United States Patent Application Publication US 2026/0125700 A1 - sequence listing, part 4

SEQ ID NO: 15796 - protein, 621 aa, Homo sapiens
MEFPGGNDNYLTITGPSHPFLSGAETFHTPSLGDEEFEIPPISLDSDPSLAVSDVVGHFDDLADPSSSQDGSFSAQYGVQTLDMPVGMTHGLMEQGGGLLSGGLTMDLDHSIGTQYSANPPVTIDVPMTDMTSGLMGHSQLTTIDQSELSSQLGLSLGGGTILPPAQSPEDRLSTTPSPTSSLHEDGVEDFRRQLPSQKTVVVEAGKKQKAPKKRKKKDPNEPQKPVSAYALFFRDTQAAIKGQNPNATFGEVSKIVASMWDSLGEEQKQVYKRKTEAAKKEYLKALAAYKDNQECQATVETVELDPAPPSQTPSPPPMATVDPASPAPASIEPPALSPSIVVNSTLSSYVANQASSGAGGQPNITKLIITKQMLPSSITMSQGGMVTVIPATVVTSRGLQLGQTSTATIQPSQQAQIVTRSVLQAAAAAAAAASMQLPPPRLQPPPLQQMPQPPTQQQVTILQQPPPLQAMQQPPPQKVRINLQQQPPPLQIKSVPLPTLKMQTTLVPPTVESSPERPMNNSPEAHTVEAPSPETICEMITDVVPEVESPSQMDVELVSGSPVALSPQPRCVRSGCENPPIVSKDWDNEYCSNECVVKHCRDVFLAWVASRNSNTVVFVK

SEQ ID NO: 15797 - protein, 393 aa, Homo sapiens [sequence omitted]

SEQ ID NO: 15798 - protein, 680 aa, Homo sapiens
MNFETSRCATLQYCPDPYIQRFVETPAHFSWKESYYRSTMSQSTQTNEFLSPEVFQHIWDFLEQPICSVQPIDLNFVDEPSEDGATNKIEISMDCIRMQDSDLSDPMWPQYTNLGLLNSMDQQIQNGSSSTSPYNTDHAQNSVTAPSPYAQPSSTFDALSPSPAIPSNTDYPGPHSFDVSFQQSSTAKSATWTYSTELKKLYCQIAKTCPIQIKVMTPPPQGAVIRAMPVYKKAEHVTEVVKRCPNHELSREFNEGQIAPPSHLIRVEGNSHAQYVEDPITGRQSVLVPYEPPQVGTEFTTVLYNFMCNSSCVGGMNRRPILIIVTLETRDGQVLGRRCFEARICACPGRDRKADEDSIRKQQVSDSTKNGDGTKRPFRQNTHGIQMTSIKKRRSPDDELLYLPVRGRETYEMLLKIKESLELMQYLPQHTIETYRQQQQQQHQHLLQKQTSIQSPSSYGNSSPPLNKMNSMNKLPSVSQLINPQQRNALTPTTIPDGMGANIPMMGTHMPMAGDMNGLSPTQALPPPLSMPSTSHCTPPPPYPTDCSIVSFLARLGCSSCLDYFTTQGLTTIYQIEHYSMDDLASLKIPEQFRHAIWKGILDHRQLHEFSSPSHLLRTPSSASTVSVGSSETRGERVIDAVRFTLRQTISFPPRDEWNDFNFDMDARRNKQQRIKEEGE

SEQ ID NO: 15799 - protein, 636 aa, Homo sapiens
MAQSTATSPDGGTTFEHLWSSLEPDSTYFDLPQSSRGNNEVVGGTDSSMDVFHLEGMTTSVMAQFNLLSSTMDQMSSRAASASPYTPEHAASVPTHSPYAQPSSTFDTMSPAPVIPSNTDYPGPHHFEVTFQQSSTAKSATWTYSPLLKKLYCQIAKTCPIQIKVSTPPPPGTAIRAMPVYKKAEHVTDVVKRCPNHELGRDFNEGQSAPASHLIRVEGNNLSQYVDDPVTGRQSVVVPYEPPQVGTEFTTILYNFMCNSSCVGGMNRRPILIIITLEMRDGQVLGRRSFEGRICACPGRDRKADEDHYREQQALNESSAKNGAASKRAFKQSPPAVPALGAGVKKRRHGDEDTYYLQVRGRENFEILMKLKESLELMELVPQPLVDSYRQQQQLLQRPSHLQPPSYGPVLSPMNKVHGGMNKLPSVNQLVGQPPPHSSAATPNLGPVGPGMLNNHGHAVPANGEMSSSHSAQSMVSGSHCTPPPPYHADPSLVSFLTGLGCPNCIEYFTSQGLQSIYHLQNLTIEDLGALKIPEQYRMTIWRGLQDLKQGHDYSTAQQLLRSSNAATISIGGSGELQRQRVMEAVHFRVRHTITIPNRGGPGGGPDEWADFGFDLPDCKARKQPIKEEFTEAEIH

SEQ ID NO: 15800 - protein, 411 aa, Homo sapiens
MLSLREQQLQVWFKNRRAKLARERRLQQQPQRVPGQRGRGARAAPLVPAASASAPQRGPSGILPAAEPTICSLHQAWGGPGCRAQKGIPAALSPGPGPIPAPIPGPAQIPGPLPGSIPGPIPGPAQIPSPIPAPIPGPISGPVQIPGPFRGPIPGPISGPAPIPGPISGPFSGPNPGPIPGPNPGPIPGPISGPIPGPISVPIPGPIPGPISGPISGPNPGPIPGPIPGPISGPNPGPIPGPISGPNPGLIPGPIPGPISGPGPIIGPIPSPAQIPGPGRLQGPGPILSPGRMRSPGSLPGLAPILGPGSGPGSGSVPAPIPGPGSLPAPAPLWPQSPDASDFLPDTQLFPHFTELLLPLDPLEGSSVSTMTSQYQEGDDSMGKKHSGSQPQEEGGSVNENHSGPRLLLDL

SEQ ID NO: 15801 - protein, 258 aa, Homo sapiens
MTHDKSWRRCSISGSTKCRCGSRIAGPNALGSGGSRSSSSSSRSILSSSILSSSIPSSSSSSSSPSSSHSSSSPSSSHSSSSPSSSSSTSSPSSSSSSSSSSSPSSSNSSSSSSSSSPSSSSSSSSSSPSSSSSSPSSSSSSSSSSPSSSSSSPSSSSSSSSSSSSSPSSSSPSSSGSSPSSSNSSPSSSSSSPSSSSSSPSPRSSSPSSSSSSTSSPSTSSPSSSSPSSSSPSSSCPSAALGRRPQSPQSSHCAPFP

SEQ ID NO: 15802 - protein, 1200 aa, Homo sapiens
MGDQQLYKTNHVAHGSENLFYQQPPLGVHSGLNHNYGNAVTGGGMDAPQASPISPHFPQDTRDGLGLPVGSKNLGQMDTSRQGGWGSHAGPGNHVQLRGNLANSNMMWGAPAQAEPTDGYQYTYSQASEIRTQKLTSGVLHKLDSFTQVFANQNLRIQVNNMAQVLHTQSAVMDGAPDSALRQLLSQKPMEPPAPAIPSRYQQVPQQPHPGFTGGLSKPALQVGQHPTQGHLYYDYQQPLAQVPVQGGQPLQAPQMLSQHMQQMQQHQYYPPQQQQQAGQQRISMQEIQTQPQQIRPSQPQPPPQQQQPQQLQLQQRQGSMQIPQYYQPQPMMQHLQEQQQQQMHLQPPSYHRDPHQYTPEQAHTVQLIPLGSMSQYYYQEPQQPYSHPLYQQSHLSQHQQREDSQLKTYSSDRQAQAMLSSHGDLGPPDTGMGDPASSDLTRVSSTLPHRPLLSPSGIHLNNMGPQHQQLSPSAMWPQMHLPDGRAQPGSPESSGQPKGAFGEQFDAKNKLTCSICLKEFKNLPALNGHMRSHGGMRASPNLKQEEGEKVLPPQPQPPLPPPPPPPPPPQLPPEAESLTPMVMPVSVPVKLLPPKPSSQGFTNSTVAAPSARDKPASSMSDDEMPVLEIPRKHQPSVPKAEEPLKTVQEKKKFRHRPEPLFIPPPPSYNPNPAASYSGATLYQSQLRSPRVLGDHLLLDPTHELPPYTPPPMLSPVRQGSGLFSNVLISGHGPGAHPQLPLTPLTPTPRVLLCRSNSIDGSNVTVTPGPGEQTVDVEPRINIGLRFQAEIPELQDISALAQDTHKATLVWKPWPELENHDLQQRVENLLNLCCSSALPGGGTNSEFALHSLFEAKGDVMVALEMLLLRKPVRLKCHPLANYHYAGSDKWTSLERKLFNKALATYSKDFIFVQKMVKSKTVAQCVEYYYTWKKIMRLGRKHRTRLAEIIDDCVTSEEEEELEEEEEEDPEEDRKSTKEEESEVPKSPEPPPVPVLAPTEGPPLQALGQPSGSFICEMPNCGAVFSSRQALNGHARIHGGTNQVTKARGAIPSGKQKPGGTQSGYCSVKSSPSHSTTSGETDPTTIFPCKECGKVFFKIKSRNAHMKTHRQQEEQQRQKAQKAAFAAEMAATIERTTGPVGAPGLLPLDQLSLIKPIKDVDILDDDVVQQLGGVMEEAEVVDTDLLLDDQDSVLLQGDAEL

SEQ ID NO: 15803 - protein, 1281 aa, Homo sapiens
MVRKKNPPLRNVASEGEGQILEPIGTESKVSGKNKEFSADQMSENTDQSDAAELNHKEEHSLHVQDPSSSSKKDLKSAVLSEKAGFNYESPSKGGNFPSFPHDEVTDRNMLAFSSPAAGGVCEPLKSPQRAEADDPQDMACTPSGDSLETKEDQKMSPKATEETGQAQSGQANCQGLSPVSVASKNPQVPSDGGVRLNKSKTDLLVNDNPDPAPLSPELQDFKCNICGYGYYGNDPTDLIKHFRKYHLGLHNRTRQDAELDSKILALHNMVQFSHSKDFQKVNRSVFSGVLQDINSSRPVLLNGTYDVQVTSGGTFIGIGRKTPDCQGNTKYFRCKFCNFTYMGNSSTELEQHFLQTHPNKIKASLPSSEVAKPSEKNSNKSIPALQSSDSGDLGKWQDKITVKAGDDTPVGYSVPIKPLDSSRQNGTEATSYYWCKFCSFSCESSSSLKLLEHYGKQHGAVQSGGLNPELNDKLSRGSVINQNDLAKSSEGETMTKTDKSSSGAKKKDFSSKGAEDNMVTSYNCQFCDFRYSKSHGPDVIVVGPLLRHYQQLHNIHKCTIKHCPFCPRGLCSPEKHLGEITYPFACRKSNCSHCALLLLHLSPGAAGSSRVKHQCHQCSFTTPDVDVLLFHYESVHESQASDVKQEANHLQGSDGQQSVKESKEHSCTKCDFITQVEEEISRHYRRAHSCYKCRQCSFTAADTQSLLEHFNTVHCQEQDITTANGEEDGHAISTIKEEPKIDFRVYNLLTPDSKMGEPVSESVVKREKLEEKDGLKEKVWTESSSDDLRNVTWRGADILRGSPSYTQASLGLLTPVSGTQEQTKTLRDSPNVEAAHLARPIYGLAVETKGFLQGAPAGGEKSGALPQQYPASGENKSKDESQSLLRRRRGSGVFCANCLTTKTSLWRKNANGGYVCNACGLYQKLHSTPRPLNIIKQNNGEQIIRRRTRKRLNPEALQAEQLNKQQRGSNEEQVNGSPLERRSEDHLTESHQREIPLPSLSKYEAQGSLTKSHSAQQPVLVSQTLDIHKRMQPLHIQIKSPQESTGDPGNSSSVSEGKGSSERGSPIEKYMRPAKHPNYSPPGSPIEKYQYPLFGLPFVHNDFQSEADWLRFWSKYKLSVPGNPHYLSHVPGLPNPCQNYVPYPTFNLPPHFSAVGSDNDIPLDLAIKHSRPGPTANGASKEKTKAPPNVKNEGPLNVVKTEKVDRSTQDELSTKCVHCGIVFLDEVMYALHMSCHGDSGPFQCSICQHLCTDKYDFTTHIQRGLHRNNAQVEKNGKPKE

SEQ ID NO: 15804 - protein, 1073 aa, Homo sapiens
MHQPPESTAAAAAAADISARKMAHPAMFPRRGSGSGSASALNAAGTGVGSNATSSEDFPPPSLLQPPPPAASSTSGPQPPPPQSLNLLSQAQLQAQPLAPGGTQMKKKSGFQITSVTPAQISASISSNNSIAEDTESYDDLDESHTEDLSSSEILDVSLSRATDLGEPERSSSEETLNNFQEAETPGAVSPNQPHLPQPHLPHLPQQNVVINGNAHPHHLHHHHQIHHGHHLQHGHHHPSHVAVASASITGGPPSSPVSRKLSTTGSSDSITPVAPTSAVSSSGSPASVMTNMRAPSTTGGIGINSVTGTSTVNNVNITAVGSFNPNVTSSMLGNVNISTSNIPSAAGVSVGPGVTSGVNVNILSGMGNGTISSSAAVSSVPNAAAGMTGGSVSSQQQQPTVNTSRFRVVKLDSSSEPFKKGRWTCTEFYEKENAVPATEGVLINKVVETVKQNPIEVTSERESTSGSSVSSSVSTLSHYTESVGSGEMGAPTVVVQQQQQQQQQQQQQPALQGVTLQQMDFGSTGPQSIPAVSIPQSISQSQISQVQLQSQELSYQQKQGLQPVPLQATMSAATGIQPSPVNVVGVTSALGQQPSISSLAQPQLPYSQAAPPVQTPLPGAPPPQQLQYGQQQPMVSTQMAPGHVKSVTQNPASEYVQQQPILQTAMSSGQPSSAGVGAGTTVIPVAQPQGIQLPVQPTAVPAQPAGASVQPVGQAPAAVSAVPTGSQIANIGQQANIPTAVQQPSTQVPPSVIQQGAPPSSQVVPPAQTGIIHQGVQTSAPSLPQQLVIASQSSLLTVPPQPQGVEPVAQGIVSQQLPAVSSLPSASSISVTSQVSSTGPSGMPSAPTNLVPPQNIAQTPATQNGNLVQSVSQPPLIATNTNLPLAQQIPLSSTQFSAQSLAQAIGSQIEDARRAAEPSLVGLPQTISGDSGGMSAVSDGSSSSLAASASLFPLKVLPLTTPLVDGEDESSSGASVVAIDNKIEQAMDLVKSHLMYAVREEVEVLKEQIKELIEKNSQLEQENNLLKTLASPEQLAQFQAQLQTGSPPATTQPQGTTQPPAQPASQGSGPTA

SEQ ID NO: 15805 - protein, 780 aa, Homo sapiens
MSKMPAKKKSCFQITSVTTAQVATSITEDTESLDDPDESRTEDVSSEIFDVSRATDYGPEEVCERSSSEETLNNVGDAETPGTVSPNLLLDGQLAAAAAAPANGGGVVSARSVSGALASTLAAAATSAPAPGAPGGPQLAGSSAGPVTAAPSQPPTTCSSRFRVIKLDHGSGEPYRRGRWTCMEYYERDSDSSVLTRSGDCIRHSSTFDQTAERDSGLGATGGSVVVVVASMQGAHGPESGTDSSLTAVSQLPPSEKMSQPTPAQPQSFSVGQPQPPPPPVGGAVAQSSAPLPPFPGAATGPQPMMAAAQPSQPQGAGPGGQTLPPTNVTLAQPAMSLPPQPGPAVGAPAAQQPQQFAYPQPQIPPGHLLPVQPSGQSEYLQQHVAGLQPPSPAQPSSTGAAASPATAATLPVGTGQNASSVGAQLMGASSQPSEAMAPRTGPAQGGQVAPCQPTGVPPATVGGVVQPCLGPAGAGQPQSVPPPQMGGSGPLSAVPGGPHAVVPGVPNVPAAVPAPSVPSVSTTSVTMPNVPAPLAQSQQLSSHTPVSRSSSIIQHVGLPLAPGTHSAPTSLPQSDLSQFQTQTQPLVGQVDDTRRKSEPLPQPPLSLIAENKPVVKPPVADSLANPLQLTPMNSLATSVFSIAIPVDGDEDRNPSTAFYQAFHLNTLKESKSLWDSASGGGVVAIDNKIEQAMDLVKSHLMYAVREEVEVLKEQIKELVERNSLLERENALLKSLSSNDQLSQLPTQQANPGSTSQQQAVIAQPPQPTQPPQQPNVSSA

SEQ ID NO: 15806 - protein, 134 aa, Homo sapiens
MNTEMYQTPMEVAVYQLHNFSISFFSSLLGGDVVSVKLDNSASGASVVAIDNKIEQAMDLVKNHLMYAVREEVEILKEQIRELVEKNSQLERENTLLKTLASPEQLEKFQSCLSPEEPAPESPQVPEAPGGSAV

SEQ ID NO: 15807 - protein, 395 aa, Homo sapiens; identical to SEQ ID NO: 13773

SEQ ID NO: 15808 - protein, 1077 aa, Homo sapiens
MPRRKQQAPRRSAAYVPEEELKAAEIDEEHVEDDGLSLDIQESEYMCNEETEIKEAQSYQNSPVSSATNQDAGYGSPFSESSDQLAHFKGSSSREEKEDPQCPDSVSYPQDSLAQIKAVYANLFSESCWSSLALDLKKSGSTTSTNDASQKESSAPTPTPPTCPVSTTGPTTSTPSTSCSSSTSHSSTTSTSSSSGYDWHQAALAKTLQQTSSYGLLPEPSLFSTVQLYRQNNKLYGSVFTGASKFRCKDCSAAYDTLVELTVHMNETGHYRDDNRDKDSEKTKRWSKPRKRSLMEMEGKEDAQKVLKCMYCGHSFESLQDLSVHMIKTKHYQKVPLKEPVPAITKLVPSTKKRALQDLAPPCSPEPAGMAAEVALSESAKDQKAANPYVTPNNRYGYQNGASYTWQFEARKAQILKCMECGSSHDTLQQLTAHMMVTGHFLKVTTSASKKGKQLVLDPVVEEKIQSIPLPPTTHTRLPASSIKKQPDSPAGSTTSEEKKEPEKEKPPVAGDAEKIKEESEDSLEKFEPSTLYPYLREEDLDDSPKGGLDILKSLENTVSTAISKAQNGAPSWGGYPSIHAAYQLPGTVKPLPAAVQSVQVQPSYAGGVKSLSSAEHNALLHSPGSLTPPPHKSNVSAMEELVEKVTGKVNIKKEERPPEKEKSSLAKAASPIAKENKDFPKTEEVSGKPQKKGPEAETGKAKKEGPLDVHTPNGTEPLKAKVTNGCNNLGIIMDHSPEPSFINPLSALQSIMNTHLGKVSKPVSPSLDPLAMLYKISNSMLDKPVYPATPVKQADAIDRYYYENSDQPIDLTKSKNKPLVSSVADSVASPLRESALMDISDMVKNLTGRLTPKSSTPSTVSEKSDADGSSFEEALDELSPVHKRKGRQSNWNPQHLLILQAQFASSLRETTEGKYIMSDLGPQERVHISKFTGLSMTTISHWLANVKYQLRRTGGTKFLKNLDTGHPVFFCNDCASQFRTASTYISHLETHLGFSLKDLSKLPLNQIQEQQNVSKVLTNKTLGPLGATEEDLGSTFQCKLCNRTFASKHAVKLHLSKTHGKSPEDHLIYVTELEKQ

SEQ ID NO: 15809 - protein, 1034 aa, Homo sapiens
MPRRKQQAPKRAAGYAQEEQLKEEEEIKEEEEEEDSGSVAQLQGGNDTGTDEELETGPEQKGCFSYQNSPGSHLSNQDAENESLLSDASDQVSDIKSVCGRDASDKKAHTHVRLPNEAHNCMDKMTAVYANILSDSYWSGLGLGFKLSNSERRNCDTRNGSNKSDFDWHQDALSKSLQQNLPSRSVSKPSLFSSVQLYRQSSKMCGTVFTGASRFRCRQCSAAYDTLVELTVHMNETGHYQDDNRKKDKLRPTSYSKPRKRAFQDMDKEDAQKVLKCMFCGDSFDSLQDLSVHMIKTKHYQKVPLKEPVPTISSKMVTPAKKRVFDVNRPCSPDSTTGSFADSFSSQKNANLQLSSNNRYGYQNGASYTWQFEACKSQILKCMECGSSHDTLQQLTTHMMVTGHFLKVTSSASKKGKQLVLDPLAVEKMQSLSEAPNSDSLAPKPSSNSASDCTASTTELKKESKKERPEETSKDEKVVKSEDYEDPLQKPLDPTIKYQYLREEDLEDGSKGGGDILKSLENTVTTAINKAQNGAPSWSAYPSIHAAYQLSEGTKPPLPMGSQVLQIRPNLTNKLRPIAPKWKVMPLVSMPTHLAPYTQVKKESEDKDEAVKECGKESPHEEASSFSHSEGDSFRKSETPPEAKKTELGPLKEEEKLMKEGSEKEKPQPLEPTSALSNGCALANHAPALPCINPLSALQSVLNNHLGKATEPLRSPSCSSPSSSTISMFHKSNLNVMDKPVLSPASTRSASVSRRYLFENSDQPIDLTKSKSKKAESSQAQSCMSPPQKHALSDIADMVKVLPKATTPKPASSSRVPPMKLEMDVRRFEDVSSEVSTLHKRKGRQSNWNPQHLLILQAQFASSLFQTSEGKYLLSDLGPQERMQISKFTGLSMTTISHWLANVKYQLRKTGGTKFLKNMDKGHPIFYCSDCASQFRTPSTYISHLESHLGFQMKDMTRLSVDQQSKVEQEISRVSSAQRSPETIAAEEDTDSKFKCKLCCRTFVSKHAVKLHLSKTHSKSPEHHSQFVTDVDEE

SEQ ID NO: 15810 - protein, 1081 aa, Homo sapiens
MPRRKQQAPRRAAAYVSEELKAAALVDEGLDPEEHTADGEPSAKYMCPEKELARACPSYQNSPAAEFSCHEMDSESHISETSDRMADFESGSIKNEEETKEVTVPLEDTTVSDSLEQMKAVYNNFLSNSYWSNLNLNLHQPSSEKNNGSSSSSSSSSSSCGSGSFDWHQSAMAKTLQQVSQSRMLPEPSLFSTVQLYRQSSKLYGSIFTGASKFRCKDCSAAYDTLVELTVHMNETGHYRDDNHETDNNNPKRWSKPRKRSLLEMEGKEDAQKVLKCMYCGHSFESLQDLSVHMIKTKHYQKVPLKEPVTPVAAKIIPATRKKASLELELPSSPDSTGGTPKATISDTNDALQKNSNPYITPNNRYGHQNGASYAWHFEARKSQILKCMECGSSHDTLQELTAHMMVTGHFIKVTNSAMKKGKPIVETPVTPTITTLLDEKVQSVPLAATTFTSPSNTPASISPKLNVEVKKEVDKEKAVTDEKPKQKDKPGEEEEKCDISSKYHYLTENDLEESPKGGLDILKSLENTVTSAINKAQNGTPSWGGYPSIHAAYQLPNMMKLSLGSSGKSTPLKPMFGNSEIVSPTKNQTLVSPPSSQTSPMPKTNFHAMEELVKKVTEKVAKVEEKMKEPDGKLSPPKRATPSPCSSEVGEPIKMEASSDGGFRSQENSPSPPRDGCKDGSPLAEPVENGKELVKPLASSLSGSTAIITDHPPEQPFVNPLSALQSVMNIHLGKAAKPSLPALDPMSMLFKMSNSLAEKAAVATPPPLQSKKADHLDRYFYHVNNDQPIDLTKGKSDKGCSLGSVLLSPTSTAPATSSSTVTTAKTSAVVSFMSNSPLRENALSDISDMLKNLTESHTSKSSTPSSISEKSDIDGATLEEAEESTPAQKRKGRQSNWNPQHLLILQAQFAASLRQTSEGKYIMSDLSPQERMHISRFTGLSMTTISHWLANVKYQLRRTGGTKFLKNLDTGHPVFFCNDCASQIRTPSTYISHLESHLGFRLRDLSKLSTEQINSQIAQTKSPSEKMVTSSPEEDLGTSYQCKLCNRTFASKHAVKLHLSKTHGKSPEDHLLYVSELEKQ

SEQ ID NO: 15811 - protein, 371 aa, Homo sapiens; identical to SEQ ID NO: 15392

SEQ ID NO: 15812 - protein, 905 aa, Homo sapiens
MEGESSRFEIHTPVSDKKKKKCSIHKERPQKHSHEIFRDSSLVNEQSQITRRKKRKKDFQHLISSPLKKSRICDETANATSTLKKRKKRRYSALEVDEEAGVTVVLVDKENINNTPKHFRKDVDVVCVDMSIEQKLPRKPKTDKFQVLAKSHAHKSEALHSKVREKKNKKHQRKAASWESQRARDTLPQSESHQEESWLSVGPGGEITELPASAHKNKSKKKKKKSSNREYETLAMPEGSQAGREAGTDMQESQPTVGLDDETPQLLGPTHKKKSKKKKKKKSNHQEFEALAMPEGSQVGSEVGADMQESRPAVGLHGETAGIPAPAYKNKSKKKKKKSNHQEFEAVAMPESLESAYPEGSQVGSEVGTVEGSTALKGFKESNSTKKKSKKRKLTSVKRARVSGDDFSVPSKNSESTLFDSVEGDGAMMEEGVKSRPRQKKTQACLASKHVQEAPRLEPANEEHNVETAEDSEIRYLSADSGDADDSDADLGSAVKQLQEFIPNIKDRATSTIKRMYRDDLERFKEFKAQGVAIKFGKFSVKENKQLEKNVEDFLALTGIESADKLLYTDRYPEEKSVITNLKRRYSFRLHIGRNIARPWKLIYYRAKKMFDVNNYKGRYSEGDTEKLKMYHSLLGNDWKTIGEMVARSSLSVALKFSQISSQRNRGAWSKSETRKLIKAVEEVILKKMSPQELKEVDSKLQENPESCLSIVREKLYKGISWVEVEAKVQTRNWMQCKSKWTEILTKRMTNGRRIYYGMNALRAKVSLIERLYEINVEDTNEIDWEDLASAIGDVPPSYVQTKFSRLKAVYVPFWQKKTFPEIIDYLYETTLPLLKEKLEKMMEKKGTKIQTPAAPKQVFPFRDIFYYEDDSEGEDIEKESEGQAPCMAHACNSSTLGGQGRWII

SEQ ID NO: 15813 - protein, 373 aa, Homo sapiens; identical to SEQ ID NO: 14989

SEQ ID NO: 15814 - protein, 1162 aa, Homo sapiens
MEEVRCPEHGTFCFLKTGVRDGPNKGKSFYVCRADTCSFVRATDIPVSHCLLHEDFVVELQGLLLPQDKKEYRLFFRCIRSKAEGKRWCGSIPWQDPDSKEHSVSNKSQHASETFHHSSNWLRNPFKVLDKNQEPALWKQLIKGEGEEKKADKKQREKGDQLFDQKKEQKPEMMEKDLSSGLVPKKKQSVVQEKKQEEGAEIQCEAETGGTHKRDFSEIKSQQCQGNELTRPSASSQEKSSGKSQDVQRESEPLREKVTQLLPQNVHSHNSISKPQKGGPLNKEYTNWEAKETKAKDGPSIQATQKSLPQGHFQERPETHSVPAPGGPAAQAAPAAPGLSLGEGREAATSSDDEEEDDVVFVSSKPGSPLLFDSTLDLETKENLQFPDRSVQRKVSPASGVSKKVEPSDPVARRVYLTTQLKQKKSTLASVNIQALPDKGQKLIKQIQELEEVLSGLTLSPEQGTNEKSNSQVPQQSHFTKTTTGPPHLVPPQPLPRRGTQPVGSLELKSACQVTAGGSSQCYRGHTNQDHVHAVWKITSEAIGQLHRSLESCPGETVVAEDPAGLKVPLLLHQKQALAWLLWRESQKPQGGILADDMGLGKTLTMIALILTQKNQEKKEEKEKSTALTWLSKDDSCDFTSHGTLIICPASLIHHWKNEVEKRVNSNKLRVYLYHGPNRDSRARVLSTYDIVITTYSLVAKEIPTNKQEAEIPGANLNVEGTSTPLLRIAWARIILDEAHNVKNPRVQTSIAVCKLQACARWAVTGTPIQNNLLDMYSLLKFLRCSPFDEFNLWRSQVDNGSKKGGERLSILTKSLLLRRTKDQLDSTGRPLVILPQRKFQLHHLKLSEDEETVYNVFFARSRSALQSYLKRHESRGNQSGRSPNNPFSRVALEFGSEEPRHSEAADSPRSSTVHILSQLLRLRQCCCHLSLLKSALDPMELKGEGLVLSLEEQLSALTLSELRDSEPSSTVSLNGTFFKMELFEGMRESTKISSLLAELEAIQRNSASQKSVIVSQWTNMLKVVALHLKKHGLTYATIDGSVNPKQRMDLVEAFNHSRGPQVMLISLLAGGVGLNLTGGNHLFLLDMHWNPSLEDQACDRIYRVGQQKDVVIHRFVCEGTVEEKILQLQEKKKDLAKQVLSGSGESVTKLTLADLRVLFGI

SEQ ID NO: 15815 - protein, 506 aa, Homo sapiens
MTSKPHSDWIPYSVLDDEGRNLRQQKLDRQRALLEQKQKKKRQEPLMVQANADGRPRSRRARQSEEQAPLVESYLSSSGSTSYQVQEADSLASVQLGATRPTAPASAKRTKAAATAGGQGGAARKEKKGKHKGTSGPAALAEDKSEAQGPVQILTVGQSDHAQDAGETAAGGGERPSGQDLRATMQRKGISSSMSFDEDEEDEEENSSSSSQLNSNTRPSSATSRKSVREAASAPSPTAPEQPVDVEVQDLEEFALRPAPQGITIKCRITRDKKGMDRGMYPTYFLHLDREDGKKVFLLAGRKRKKSKTSNYLISVDPTDLSRGGDSYIGKLRSNLMGTKFTVYDNGVNPQKASSSTLESGTLRQELAAVCYETNVLGFKGPRKMSVIVPGMNMVHERVSIRPRNEHETLLARWQNKNTESIIELQNKTPVWNDDTQSYVLNFHGRVTQASVKNFQIIHGNDPDYIVMQFGRVAEDVFTMDYNYPLCALQAFAIALSSFDSKLACE

SEQ ID NO: 15816 - protein, 202 aa, Homo sapiens
MMQDVSSSPVSPADDSLSNSEEEPDRQQPPSGKRGGRKRRSSRRSAGGGAGPGGAAGGGVGGGDEPGSPAQGKRGKKSAGCGGGGGAGGGGGSSSGGGSPQSYEELQTQRVMANVRERQRTQSLNEAFAALRKIIPTLPSDKLSKIQTLKLAARYIDFLYQVLQSDELDSKMASCSYVAHERLSYAFSVWRMEGAWSMSASH

SEQ ID NO: 15817 - protein, 160 aa, Homo sapiens
MEEGSSSPVSPVDSLGTSEEELERQPKRFGRKRRYSKKSSEDGSPTPGKRGKKGSPSAQSFEELQSQRILANVRERQRTQSLNEAFAALRKIIPTLPSDKLSKIQTLKLAARYIDFLYQVLQSDEMDNKMTSCSYVAHERLSYAFSVWRMEGAWSMSASH

SEQ ID NO: 15818 - protein, 540 aa, Homo sapiens
MAWVLKMDEVIESGLVHDFDASLSGIGQELGAGAYSMSDVLALPIFKQEDSSLPLDGETEHPPFQYVMCAATSPAVKLHDETLTYLNQGQSYEIRMLDNRKMGDMPEINGKLVKSIIRVVFHDRRLQYTEHQQLEGWKWNRPGDRLLDLDIPMSVGIIDTRTNPSQLNAVEFLWDPAKRTSAFIQVHCISTEFTPRKHGGEKGVPFRIQVDTFKQNENGEYTDHLHSASCQIKVFKPKGADRKQKTDREKMEKRTAHEKEKYQPSYDTTILTEMRLEPIIEDAVEHEQKKSSKRTLPADYGDSLAKRGSCSPWPDAPTAYVNNSPSPAPTFTSPQQSTCSVPDSNSSSPNHQGDGASQTSGEQIQPSATIQETQQWLLKNRFSSYTRLFSNFSGADLLKLTKEDLVQICGAADGIRLYNSLKSRSVRPRLTIYVCREQPSSTVLQGQQQAASSASENGSGAPYVYHAIYLEEMIASEVARKLALVFNIPLHQINQVYRQGPTGIHILVSDQMVQNFQDESCFLFSTVKAESSDGIHIILK

SEQ ID NO: 15819 - protein, 764 aa, Homo sapiens
MNGEADCPTDLEMAAPKGQDRWSQEDMLTLLECMKNNLPSNDSSKFKTTESHMDWEKVAFKDFSGDMCKLKWVEISNEVRKFRTLTELILDAQEHVKNPYKGKKLKKHPDFPKKPLTPYFRFFMEKRAKYAKLHPEMSNLDLTKILSKKYKELPEKKKMKYIQDFQREKQEFERNLARFREDHPDLIQNAKKSDIPEKPKTPQQLWYTHEKKVYLKVRPDATTKEVKDSLGKQWSQLSDKKRLKWIHKALEQRKEYEEIMRDYIQKHPELNISEEGITKSTLTKAERQLKDKFDGRPTKPPPNSYSLYCAELMANMKDVPSTERMVLCSQQWKLLSQKEKDAYHKKCDQKKKDYEVELLRFLESLPEEEQQRVLGEEKMLNINKKQATSPASKKPAQEGGKGGSEKPKRPVSAMFIFSEEKRRQLQEERPELSESELTRLLARMWNDLSEKKKAKYKAREAALKAQSERKPGGEREERGKLPESPKRAEEIWQQSVIGDYLARFKNDRVKALKAMEMTWNNMEKKEKLMWIKKAAEDQKRYERELSEMRAPPAATNSSKKMKFQGEPKKPPMNGYQKFSQELLSNGELNHLPLKERMVEIGSRWQRISQSQKEHYKKLAEEQQKQYKVHLDLWVKSLSPQDRAAYKEYISNKRKSMTKLRGPNPKSSRTTLQSKSESEEDDEEDEDDEDEDEEEEDDENGDSSEDGGDSSESSSEDESEDGDENEEDDEDEDDDEDDDEDEDNESEGSSSSSSSSGDSSDSDSN

SEQ ID NO: 15820 - protein, 393 aa, Homo sapiens
MALPRSQGHWSNKDILRLLECMENNRPSDDNSTFSSTQSHMDWGKVAFKNFSGEMCRLKWLEISCNLRKFGTLKELVLEAKKCVKKMNKSQKYRNGPDFPKRPLTAYNRFFKESWPQYSQMYPGMRSQELTKILSKKYRELPEQMKQKYIQDFRKEKQEFEEKLARFREEHPDLVQKAKKSSVSKRTQNKVQKKFQKNIEEVRSLPKTDRFFKKVKFHGEPQKPPMNGYHKFHQDSWSSKEMQHLSVRERMVEIGRRWQRIPQSQKDHFKSQAEELQKQYKVKLDLWLKTLSPENYAAYKESTYAKGKNMAMTGGPDPRLKQADPQSSSAKGLQEGFGEGQGLQAAGTDSSQTIWVNCHVSMEPEENRKKDREKEESSNSSDCSSGEEIEVDV

SEQ ID NO: 15821 - protein, 400 aa, Homo sapiens
MPAKDIKVALPRSQGHWSNADILRLLECMENNLPYDDNGTFSSTQSHMDWGKVAFKNFSGEMCRLKWLEISCSLRKFSTLKKLVLEAKKCVKNTNKSQKGRNHPDFPKRLLTAYIRFFKENWPQYSQMYPGMRSQEVTKILSKKYKELPEQMKQKHIQDFRKEKQEFEEKLARFREEHPDLDQKGKKSDICKRVQTKVQKKVQKNIEEVRSLPKTDQFFKKVKFHGEPQKPPMNGYQKFHQDSWSSKELQHLSLRERMVEIGRRWQRIPQSQKDHYKSQAELLQKEYKVELDLWLKTLSPEDYAAYKESTYAKGKNMAMMGGPAPSLKQTDPQSSSAKGLQEGFGEGQGLQAAGTEASQTIWVNCQVSMEPEDNRKKDGEEEESSNSLDCSSGEDMEVDV

SEQ ID NO: 15822 - protein, 531 aa, Homo sapiens
MMDGRLLEHPHAQFGGSLGGVVGFPYPLGHHHVYELAGHQLQSAAAAASVPFSIDGLLGGSCAAAASVVNPTPLLPAACGVGGDGQPFKLSDSGDPDKESPGCKRRRTRTNFTGWQLEELEKAFNESHYPDVFMREALALRLDLVESRVQVWFQNRRAKWRKKENTKKGPGRPAHNSHPTTCSGEPMDPEEIARKELEKMEKKKRKHEKKLLKSQGRHLHSPGGLSLHSAPSSDSDSGGGGLSPEPPEPPPPAAKGPGAHASGAAGTAPAPPGEPPAPGTCDPAFYPSQRSGAGPQPRPGRPADKDAASCGPGAAVAAVERGAAGLPKASPFSVESLLSDSPPRRKAASNAAAAAAAGLDFAPGLPCAPRTLIGKGHFLLYPITQPLGFLVPQAALKGGAGLEPAPKDAPPAPAVPPAPPAQASFGAFSGPGGAPDSAFARRSPDAVASPGAPAPAPAPFRDLASAAATEGGGGDCADAGTAGPAPPPPAPSPRPGPRPPSPAEEPATCGVPEPGAAAGPSPPEGEELDMD

SEQ ID NO: 15823 - protein, 810 aa, Homo sapiens
MSKGPGPGGSAASSAPPAATAQVLQAQPEKPQHYTYLKEFRTEQCPLFVQHKCTQHRPYTCFHWHFVNQRRRRSIRRRDGTFNYSPDVYCTKYDEATGLCPEGDECPFLHRTTGDTERRYHLRYYKTGICIHETDSKGNCTKNGLHCAFAHGPHDLRSPVYDIRELQAMEALQNGQTTVEGSIEGQSAGAASHAMIEKILSEEPRWQETAYVLGNYKTEPCKKPPRLCRQGYACPYYHNSKDRRRSPRKHKYRSSPCPNVKHGDEWGDPGKCENGDACQYCHTRTEQQFHPEIYKSTKCNDMQQSGSCPRGPFCAFAHVEQPPLSDDLQPSSAVSSPTQPGPVLYMPSAAGDSVPVSPSSPHAPDLSALLCRNSSLGSPSNLCGSPPGSIRKPPNLEGIVFPGESGLAPGSYKKAPGFEREDQVGAEYLKNFKCQAKLKPHSLEPRSQEQPLLQPKQDMLGILPAGSPLTSSISSSITSSLAATPPSPVGTSSVPGMNANALPFYPTSDTVESVIESALDDLDLNEFGVAALEKTFDNSTVPHPGSITIGGSLLQSSAPVNIPGSLGSSASFHSASPSPPVSLSSHFLQQPQGHLSQSENTFLGTSASHGSLGLNGMNSSIWEHFASGSFSPGTSPAFLSGPGAAELARLRQELDEANSTIKQWEESWKQAKQACDAWKKEAEEAGERASAAGAECELAREQRDALEVQVKKLQEELERLHAGPEPQALPAFSDLEALSLSTLYSLQKQLRAHLEQVDKAVFHMQSVKCLKCQEQKRAVLPCQHAALCELCAEGSECPICQPGRAHTLQS

SEQ ID NO: 15824 - protein, 680 aa, Homo sapiens
MPSVSKAAAAALSGSPPQTEKPTHYRYLKEFRTEQCPLFSQHKCAQHRPFTCFHWHFLNQRRRRPLRRRDGTFNYSPDVYCSKYNEATGVCPDGDECPYLHRTTGDTERKYHLRYYKTGTCIHETDARGHCVKNGLHCAFAHGPLDLRPPVCDVRELQAQEALQNGQLGGGEGVPDLQPGVLASQAMIEKILSEDPRWQDANFVLGSYKTEQCPKPPRLCRQGYACPHYHNSRDRRRNPRRFQYRSTPCPSVKHGDEWGEPSRCDGGDGCQYCHSRTEQQFHPESTKCNDMRQTGYCPRGPFCAFAHVEKSLGMVNEWGCHDLHLTSPSSTGSGQPGNAKRRDSPAEGGPRGSEQDSKQNHLAVFAAVHPPAPSVSSSVASSLASSAGSGSSSPTALPAPPARALPLGPASSTVEAVLGSALDLHLSNVNIASLEKDLEEQDGHDLGAAGPRSLAGSAPVAIPGSLPRAPSLHSPSSASTSPLGSLSQPLPGPVGSSAMTPPQQPPPLRSEPGTLGSAASSYSPLGLNGVPGSIWDFVSGSFSPSPSPILSAGPPSSSSASPNGAELARVRRQLDEAKRKIRQWEESWQQVKQVCDAWQREAQEAKERARVADSDRQLALQKKEEVEAQVIFQLRAKQCVACRERAHGAVLRPCQHHILCEPCAATAPECPYCKGQPLQW

SEQ ID NO: 15825 - protein, 310 aa, Homo sapiens
MKGQQKTAETEEGTVQIQEGAVATGEDPTSVAIASIQSAATFPDPNVKYVFRTENGGQVMYRVIQVSEGQLDGQTEGTGAISGYPATQSMTQAVIQGAFTSDDAVDTEGTAAETHYTYFPSTAVGDGAGGTTSGSTAAVVTTQGSEALLGQATPPGTGQFFVMMSPQEVLQGGSQRSIAPRTHPYSPKSEAPRTTRDEKRRAQHNEVERRRRDKINNWIVQLSKIIPDCSMESTKSGQSKGGILSKACDYIQELRQSNHRLSEELQGLDQLQLDNDVLRQQVEDLKNKNLLLRAQLRHHGLEVVIKNDSN

SEQ ID NO: 15826 - protein, 346 aa, Homo sapiens
MDMLDPGLDPAASATAAAAASHDKGPEAEEGVELQEGGDGPGAEEQTAVAITSVQQAAFGDHNIQYQFRTETNGGQVTYRVVQVTDGQLDGQGDTAGAVSVVSTAAFAGGQQAVTQVGVDGAAQRPGPAAASVPPGPAAPFPLAVIQNPFSNGGSPAAEAVSGEARFAYFPASSVGDTTAVSVQTTDQSLQAGGQFYVMMTPQDVLQTGTQRTIAPRTHPYSPKIDGTRTPRDERRRAQHNEVERRRRDKINNWIVQLSKIIPDCNADNSKTGASKGGILSKACDYIRELRQTNQRMQETFKEAERLQMDNELLRQQIEELKNENALLRAQLQQHNLEMVGEGTRQ

SEQ ID NO: 15827 - protein, 2245 aa, Homo sapiens
MPEMTENETPTKKQHRKKNRETHNAVERHRKKKINAGINRIGELIPCSPALKQSKNMILDQAFKYITELKRQNDELLLNGGNNEQAEEIKKLRKQLEEIQKENGRYIELLKANDICLYDDPTIHWKGNLKNSKVSVVIPSDQVQKKIIVYSNGNQPGGNSQGTAVQGITFNVSHNLQKQTANVVPVQRTCNLVTPVSISGVYPSENKPWHQTTVPALATNQPVPLCLPAAISAQSILELPTSESESNVLGATSGSLIAVSIESEPHQHHSLHTCLNDQNSSENKNGQENPKVLKKMTPCVTNIPHSSSATATKVHHGNKSCLSIQDFRGDFQNTFVVSVTTTVCSQPPRTAGDSSPMSISKSADLTSTATVVASSAPGVGKATIPISTLSGNPLDNGWTLSCSLPSSSVSTSDLKNINSLTRISSAGNTQTTWTTLQLAGNTIQPLSQTPSSAVTPVLNESGTSPTTSNHSRYVATDINLNNSFPADGQPVEQVVVTLPSCPSLPMQPLIAQPQVKSQPPKNILPLNSAMQVIQMAQPVGSAVNSAPTNQNVIILQPPSTTPCPTVMRAEVSNQTVGQQIVIIQAANQNPLPLLPAPPPGSVRLPINGANTVIGSNNSVQNVPTPQTFGGKHLVHILPRPSSLSASNSTQTFSVTMSNQQPQTISLNGQLFALQPVMSSSGTTNQTPMQIIQPTTSEDPNTNVALNTFGALASLNQSISQMAGQSCVQLSISQPANSQTAANSQTTTANCVSLTTTAAPPVTTDSSATLASTYNLVSTSSMNTVACLPNMKSKRLNKKPGGRKHLAANKSACPLNSVRDVSKLDCPNTEGSAEPPCNDGLLESFPAVLPSVSVSQANSVSVSASHSLGVLSSESLIPESVSKSKSAEKSSPPSQESVTSEHFAMAAAKSKDSTPNLQQETSQDKPPSSLALSDAAKPCASANVLIPSPSDPHILVSQVPGLSSTTSTTSTDCVSEVEIIAEPCRVEQDSSDTMQTTGLLKGQGLTTLLSDLAKKKNPQKSSLSDQMDHPDFSSENPKIVDSSVNLHPKQELLLMNNDDRDPPQHHSCLPDQEVINGSLINGRQADSPMSTSSGSSRSFSVASMLPETTREDVTSNATTNTCDSCTFVEQTDIVALAARAIFDQENLEKGRVGLQADIREVASKPSEASLLEGDPPFKSQIPKESGTGQAEATPNEFNSQGSIEATMERPLEKPSCSLGIKTSNASLQDSTSQPPSITSLSVNNLIHQSSISHPLASCAGLSPTSEQTTVPATVNLTVSSSSYGSQPPGPSLMTEYSQEQLNTMTSTIPNSQIQEPLLKPSHESRKDSAKRAVQDDLLLSSAKRQKHCQPAPLRLESMSLMSRTPDTISDQTQMMVSQIPPNSSNSVVPVSNPAHGDGLTRLFPPSNNFVTPALRQTEVQCGSQPSVAEQQQTQASQHLQALQQHVPAQGVSHLHSNHLYIKQQQQQQQQQQQQQQQQQAGQLRERHHLYQMQHHVPHAESSVHSQPHNVHQQRTLQQEVQMQKKRNLVQGTQTSQLSLQPKHHGTDQSRSKTGQPHPHHQQMQQQMQQHFGSSQTEKSCENPSTSRNHHNHPQNHLNQDIMHQQQDVGSRQQGSGVSSEHVSGHNPMQRLLTSRGLEQQMVSQPSIVTRSSDMTCTPHRPERNRVSSYSAEALIGKTSSNSEQRMGISIQGSRVSDQLEMRSYLDVPRNKSLAIHNMQGRVDHTVASDIRLSDCQTFKPSGASQQPQSNFEVQSSRNNEIGNPVSSLRSMQSQAFRISQNTGPPPIDRQKRLSYPPVQSIPTGNGIPSRDSENTCHQSFMQSLLAPHLSDQVIGSQRSLSEHQRNTQCGPSSAIEYNCPPTHENVHIRRESESQNRESCDMSLGAINTRNSTLNIPFSSSSSSGDIQGRNTSPNVSVQKSNPMRITESHATKGHMNPPVTTNMHGVARPALPHPSVSHGNGDQGPAVRQANSSVPQRSRHPLQDSSGSKIRQPERNRSGNQRQSTVFDPSLPHLPLSTGGSMILGRQQPATEKRGSIVRFMPDSPQVPNDNSGPDQHTLSQNFGFSFIPEGGMNPPINANASFIPQVTQPSATRTPALIPVDPQNTLPSFYPPYSPAHPTLSNDISIPYFPNQMFSNPSTEKVNSGSLNNRFGSILSPPRPVGFAQPSFPLLPDMPPMHMTNSHLSNFNMTSLFPEIATVLPDGSAMSPLLTIANSSASDSSKQSSNRPAHNISHILGHDCSSAV

SEQ ID NO: 15828 - protein, 341 aa, Homo sapiens
MLLRPRRPPPLAPPAPPSPASPDPEPRTPGDAPGTPPRRPASPSALGELGLPVSPGSAQRTPWSARETELLLGTLLQPAVWRALLLDRRQALPTYRRVSAALAQQQVRRTPAQCRRRYKFLKDKFREAHGQPPGPFDEQIRKLMGLLGDNGRKRPRRRSPGSGRPQRARRPVPNAHAPAPSEPDATPLPTARDRDADPTWTLRFSPSPPKSADASPAPGSPPAPAPTALATCIPEDRAPVRGPGSPPPPPAREDPDSPPGRPEDCAPPPAAPPSLNTALLQTLGHLGDIANILGPLRDQLLTLNQHVEQLRGAFDQTVSLAVGFILGSAAAERGVLRDPCQ

SEQ ID NO: 15829 - protein, 334 aa, Homo sapiens
MFGKPDKMDVRCHSDAEAARVSKNAHKESRESKGAEGNLPAAFLKEPQGAFSASGAAEDCNKSKSNSAADPDYCRRILVRDAKGSIREIILPKGLDLDRPKRTRTSFTAEQLYRLEMEFQRCQYVVGRERTELARQLNLSETQVKVWFQNRRTKQKKDQGKDSELRSVVSETAATCSVLRLLEQGRLLSPPGLPALLPPCATGALGSALRGPSLPALGAGAAAGSAAAAAAAAPGPAGAASPHPPAVGGAPGPGPAGPGGLHAGAPAAGHSLFSLPVPSLLGSVASRLSSAPLTMAGSLAGNLQELSARYLSSSAFEPYSRTNNKEGAEKKALD

SEQ ID NO: 15830 - protein, 290 aa, Homo sapiens
MGDGGAERDRGPARRAESGGGGGRCGDRSGAGDLRADGGGHSPTEVAGTSASSPAGSRESGADSDGQPGPGEADHCRRILVRDAKGTIREIVLPKGLDLDRPKRTRTSFTAEQLYRLEMEFQRCQYVVGRERTELARQLNLSETQVKVWFQNRRTKQKKDQSRDLEKRASSSASEAFATSNILRLLEQGRLLSVPRAPSLLALTPSLPGLPASHRGTSLGDPRNSSPRLNPLSSASASPPLPPPLPAVCFSSAPLLDLPAGYELGSSAFEPYSWLERKVGSASSCKKANT

SEQ ID NO: 15831 - protein, 427 aa, Homo sapiens
MEAMAASTSLPDPGDFDRNVPRICGVCGDRATGFHFNAMTCEGCKGFFRRSMKRKALFTCPFNGDCRITKDNRRHCQACRLKRCVDIGMMKEFILTDEEVQRKREMILKRKEEEALKDSLRPKLSEEQQRIIAILLDAHHKTYDPTYSDFCQFRPPVRVNDGGGSHPSRPNSRHTPSFSGDSSSSCSDHCITSSDMMDSSSFSNLDLSEEDSDDPSVTLELSQLSMLPHLADLVSYSIQKVIGFAKMIPGFRDLTSEDQIVLLKSSAIEVIMLRSNESFTMDDMSWTCGNQDYKYRVSDVTKAGHSLELIEPLIKFQVGLKKLNLHEEEHVLLMAICIVSPDRPGVQDAALIEAIQDRLSNTLQTYIRCRHPPPGSHLLYAKMIQKLADLRSLNEEHSKQYRCLSFQPECSMKLTPLVLEVFGNEIS

SEQ ID NO: 15832 - protein, 258 aa, Homo sapiens
MRLSSSPPRGPQQLSSFGSVDWLSQSSCSGPTHTPRPADFSLGSLPGPGQTSGAREPPQAVSIKEAAGSSNLPAPERTMAGLSKEPNTLRAPRVRTAFTMEQVRTLEGVFQHHQYLSPLERKRLAREMQLSEVQIKTWFQNRRMKHKRQMQDPQLHSPFSGSLHAPPAFYSTSSGLANGLQLLCPWAPLSGPQALMLPPGSFWGLCQVAQEALASAGASCCGQPLASHPPTPGRPSLGPALSTGPRGLCAMPQTGDAF

SEQ ID NO: 15833 - protein, 521 aa, Homo sapiens
MEANWTAFLFQAHEASHHQQQAAQNSLLPLLSSAVEPPDQKPLLPIPITQKPQGAPETLKDAIGIKKEKPKTSFVCTYCSKAFRDSYHLRRHESCHTGIKLVSRPKKTPTTVVPLISTIAGDSSRTSLVSTIAGILSTVTTSSSGTNPSSSASTTAMPVTQSVKKPSKPVKKNHACEMCGKAFRDVYHLNRHKLSHSDEKPFECPICNQRFKRKDRMTYHVRSHEGGITKPYTCSVCGKGFSRPDHLSCHVKHVHSTERPFKCQTCTAAFATKDRLRTHMVRHEGKVSCNICGKLLSAAYITSHLKTHGQSQSINCNTCKQGISKTCMSEETSNQKQQQQQQQQQQQQQQQQQQHVTSWPGKQVETLRLWEEAVKARKKEAANLCQTSTAATTPVTLTTPFSITSSVSSGTMSNPVTVAAAMSMRSPVNVSSAVNITSPMNIGHPVTITSPLSMTSPLTLTTPVNLPTPVTAPVNIAHPVTITSPMNLPTPMTLAAPLNIAMRPVESMPFLPQALPTSPPW

SEQ ID NO: 15834 - protein, 365 aa, Homo sapiens
MTGRDSLSDGRTSSRALVPGGSPRGSRPRGFAITDLLGLEAELPAPAGPGQGSGCEGPAVAPCPGPGLDGSSLARGALPLGLGLLCGFGTQPPAAARAPCLLLADVPFLPPRGPEPAAPLAPSRPPPALGRQKRSDSVSTSDEDSQSEDRNDLKASPTLGKRKKRRHRTVFTAHQLEELEKAFSEAHYPDVYAREMLAVKTELPEDRIQVWFQNRRAKWRKREKRWGGSSVMAEYGLYGAMVRHCIPLPDSVLNSAEGGLLGSCAPWLLGMHKKSMGMIRKPGSEDKLAGLWGSDHFKEGSSQSESGSQRGSDKVSPENGLEDVAIDLSSSARQETKKVHPGAGAQGGSNSTALEGPQPGKVGAT

SEQ ID NO: 15835 - protein, 361 aa, Homo sapiens
MTGKAGEALSKPKSETVAKSTSGGAPARCTGFGIQEILGLNKEPPSSHPRAALDGLAPGHLLAARSVLSPAGVGGMGLLGPGGLPGFYTQPTFLEVLSDPQSVHLQPLGRASGPLDTSQTASSDSEDVSSSDRKMSKSALNQTKKRKKRRHRTIFTSYQLEELEKAFNEAHYPDVYAREMLAMKTELPEDRIQVWFQNRRAKWRKREKCWGRSSVMAEYGLYGAMVRHSIPLPESILKSAKDGIMDSCAPWLLGMHKKSLEAAAESGRKPEGERQALPKLDKMEQDERGPDAQAAISQEELRENSIAVLRAKAQEHSTKVLGTVSGPDSLARSTEKPEEEEAMDEDRPAERLSPPQLEDMA

SEQ ID NO: 15836 - protein, 1129 aa, Homo sapiens
MPATRKPMRYGHTEGHTEVCFDDSGSFIVTCGSDGDVRIWEDLDDDDPKFINVGEKAYSCALKSGKLVTAVSNNTIQVHTFPEGVPDGILTRFTTNANHVVFNGDGTKIAAGSSDFLVKIVDVMDSSQQKTFRGHDAPVLSLSFDPKDIFLASASCDGSVRVWQISDQTCAISWPLLQKCNDVINAKSICRLAWQPKSGKLLAIPVEKSVKLYRRESWSHQFDLSDNFISQTLNIVTWSPCGQYLAAGSINGLIIVWNVETKDCMERVKHEKGYAICGLAWHPTCGRISYTDAEGNLGLLENVCDPSGKTSSSKVSSRVEKDYNDLFDGDDMSNAGDFLNDNAVEIPSFSKGIINDDEDDEDLMMASGRPRQRSHILEDDENSVDISMLKTGSSLLKEEEEDGQEGSIHNLPLVTSQRPFYDGPMPTPRQKPFQSGSTPLHLTHRFMVWNSIGIIRCYNDEQDNAIDVEFHDTSIHHATHLSNTLNYTIADLSHEAILLACESTDELASKLHCLHFSSWDSSKEWIIDLPQNEDIEAICLGQGWAAAATSALLLRLFTIGGVQKEVFSLAGPVVSMAGHGEQLFIVYHRGTGFDGDQCLGVQLLELGKKKKQILHGDPLPLTRKSYLAWIGFSAEGTPCYVDSEGIVRMLNRGLGNTWTPICNTREHCKGKSDHYWVVGIHENPQQLRCIPCKGSRFPPTLPRPAVAILSFKLPYCQIATEKGQMEEQFWRSVIFHNHLDYLAKNGYEYEESTKNQATKEQQELLMKMLALSCKLEREFRCVELADLMTQNAVNLAIKYASRSRKLILAQKLSELAVEKAAELTATQVEEEEEEEDFRKKLNAGYSNTATEWSQPRFRNQVEEDAEDSGEADDEEKPEIHKPGQNSFSKSTNSSDVSAKSGAVTFSSQGRVNPFKVSASSKEPAMSMNSARSTNILDNMGKSSKKSTALSRTTNNEKSPIIKPLIPKPKPKQASAASYFQKRNSQTNKTEEVKEENLKNVLSETPAICPPQNTENQRPKTGFQMWLEENRSNILSDNPDFSDEADIIKEGMIRFRVLSTEERKVWANKAKGETASEGTEAKKRKRVVDESDETENQEEKAKENLNLSKKQKPLDFSTNQKLSAFAFKQE

SEQ ID NO: 15837 - protein, 1365 aa, Homo sapiens
MEFSIKQSPLSVQSVVKCIKMKQAPEILGSANGKTPSCEVNRECSVFLSKAQLSSSLQEGVMQKFNGHDALPFIPADKLKDLTSRVFNGEPGAHDAKLRFESQEMKGIGTPPNTTPIKNGSPEIKLKITKTYMNGKPLFESSICGDSAADVSQSEENGQKPENKARRNRKRSIKYDSLLEQGLVEAALVSKISSPSDKKIPAKKESCPNTGRDKDHLLKYNVGDLVWSKVSGYPWWPCMVSADPLLHSYTKLKGQKKSARQYHVQFFGDAPERAWIFEKSLVAFEGEGQFEKLCQESAKQAPTKAEKIKLLKPISGKLRAQWEMGIVQAEEAASMSVEERKAKFTFLYVGDQLHLNPQVAKEAGIAAESLGEMAESSGVSEEAAENPKSVREECIPMKRRRRAKLCSSAETLESHPDIGKSTPQKTAEADPRRGVGSPPGRKKTTVSMPRSRKGDAASQFLVFCQKHRDEVVAEHPDASGEEIEELLRSQWSLLSEKQRARYNTKFALVAPVQAEEDSGNVNGKKRNHTKRIQDPTEDAEAEDTPRKRLRTDKHSLRKRDTITDKTARTSSYKAMEAASSLKSQAATKNLSDACKPLKKRNRASTAASSALGFSKSSSPSASLTENEVSDSPGDEPSESPYESADETQTEVSVSSKKSERGVTAKKEYVCQLCEKPGSLLLCEGPCCGAFHLACLGLSRRPEGRFTCSECASGIHSCFVCKESKTDVKRCVVTQCGKFYHEACVKKYPLTVFESRGFRCPLHSCVSCHASNPSNPRPSKGKMMRCVRCPVAYHSGDACLAAGCSVIASNSIICTAHFTARKGKRHHAHVNVSWCFVCSKGGSLLCCESCPAAFHPDCLNIEMPDGSWFCNDCRAGKKLHFQDIIWVKLGNYRWWPAEVCHPKNVPPNIQKMKHEIGEFPVFFFGSKDYYWTHQARVFPYMEGDRGSRYQGVRGIGRVFKNALQEAEARFREIKLQREARETQESERKPPPYKHIKVNKPYGKVQIYTADISEIPKCNCKPTDENPCGFDSECLNRMLMFECHPQVCPAGEFCQNQCFTKRQYPETKIIKTDGKGWGLVAKRDIRKGEFVNEYVGELIDEEECMARIKHAHENDITHFYMLTIDKDRIIDAGPKGNYSRFMNHSCQPNCETLKWTVNGDTRVGLFAVCDIPAGTELTFNYNLDCLGNEKTVCRCGASNCSGFLGDRPKTSTTLSSEEKGKKTKKKTRRRRAKGEGKRQSEDECFRCGDGGQLVLCDRKFCTKAYHLSCLGLGKRPFGKWECPWHHCDVCGKPSTSFCHLCPNSFCKEHQDGTAFSCTPDGRSYCCEHDLGAASVRSTKTEKPPPEPGKPKGKRRRRRGWRRVTEGK

SEQ ID NO: 15838 - protein, 1651 aa, Homo sapiens
MEGSLAGSLAAPDRPQGPERLPGPAPRENIEGGAEAAEGEGGIFRSTRYLPVTKEGPRDILDGRGGISGTPDGRGPWEHPLVQEAGEGILSERRFEDSVIVRTMKPHAELEGSRRFLHHRGEPRLLEKHAQGRPRFDWLQDEDEQGSPQDAGLHLDLPAQPPPLAPFRRVFVPVEDTPKTLDMAVVGGREDLEDLEGLAQPSEWGLPTSASEVATQTWTVNSEASVERLQPLLPPIRTGPYLCELLEEVAEGVASPDEDEDEEPAVFPCIECSIYFKQKEHLLEHMSQHRRAPGQEPPADLAPLACGECGWAFADPTALEQHRQLHQASREKIIEEIQKLKQVPGDEGREARLQCPKCVFGTNSSRAYVQHAKLHMREPPGQTTKEPFGGSSGAGSPSPEASALLYQPYGAAVGLSACVFCGFPAPSESLLREHVRLVHAHPHWEEDGEAYEEDPASQPGTSQDAHACFPDTAVDYFGKAEPSLAPMWRENPAGYDPSLAFGPGCQQLSIRDFPLSKPLLHGTGQRPLGRLAFPSTLASTPYSLQLGRNKSTVHPQGLGERRRPWSEEEEEEEEEEDVVLTSEMDFSPENGVFSPLATPSLIPQAALELKQAFREALQAVEATQGQQQQLRGMVPIVLVAKLGPQVMAAARVPPRLQPEELGLAGAHPLDFLLLDAPLGGPLGLDTLLDGDPAMALKHEERKCPYCPDRFHNGIGLANHVRGHLNRVGVSYNVRHFISAEEVKAIERRFSFQKKKKKVANFDPGTFSLMRCDFCGAGFDTRAGLSSHARAHLRDFGITNWELTVSPINILQELLATSAAEQPPSPLGREPGGPPGSFLTSRRPRLPLTVPFPPTWAEDPGPAYGDAQSLTTCEVCGACFETRKGLSSHARSHLRQLGVAESESSGAPIDLLYELVKQKGLPDAHLGLPPGLAKKSSSLKEVVAGAPRPGLLSLAKPLDAPAVNKAIKSPPGFSAKGLGHPPSSPLLKKTPLALAGSPTPKNPEDKSPQLSLSPRPASPKAQWPQSEDEGPLNLTSGPEPARDIRCEFCGEFFENRKGLSSHARSHLRQMGVTEWYVNGSPIDTLREILKRRTQSRPGGPPNPPGPSPKALAKMMGGAGPGSSLEARSPSDLHISPLAKKLPPPPGSPLGHSPTASPPPTARKMFPGLAAPSLPKKLKPEQIRVEIKREMLPGALHGELHPSEGPWGAPREDMTPLNLSSRAEPVRDIRCEFCGEFFENRKGLSSHARSHLRQMGVTEWSVNGSPIDTLREILKKKSKPCLIKKEPPAGDLAPALAEDGPPTVAPGPVQSPLPLSPLAGRPGKPGAGPAQVPRELSLTPITGAKPSATGYLGSVAAKRPLQEDRLLPAEVKAKTYIQTELPFKAKTLHEKTSHSSTEACCELCGLYFENRKALASHARAHLRQFGVTEWCVNGSPIETLSEWIKHRPQKVGAYRSYIQGGRPFTKKFRSAGHGRDSDKRPSLGLAPGGLAVVGRSAGGEPGPEAGRAADGGERPLAASPPGTVKAEEHQRQNINKFERRQARPPDASAARGGEDTNDLQQKLEEVRQPPPRVRPVPSLVPRPPQTSLVKFVGNIYTLKCRFCEVEFQGPLSIQEEWVRHLQRHILEMNFSKADPPPEESQAPQAQTAAAEAP

SEQ ID NO: 15839 - protein, 449 aa, Homo sapiens
MGSDVRDLNALLPAVPSLGGGGGCALPVSGAAQWAPVLDFAPPGASAYGSLGGPAPPPAPPPPPPPPPHSFIKQEPSWGGAEPHEEQCLSAFTVHFSGQFTGTAGACRYGPFGPPPPSQASSGQARMFPNAPYLPSCLESQPAIRNQGYSTVTFDGTPSYGHTPSHHAAQFPNHSFKHEDPMGQQGSLGEQQYSVPPPVYGCHTPTDSCTGSQALLLRTPYSSDNLYQMTSQLECMTWNQMNLGATLKGVAAGSSSSVKWTEGQSNHSTGYESDNHTTPILCGAQYRIHTHGVFRGIQDVRRVPGVAPTLVRSASETSEKRPFMCAYPGCNKRYFKLSHLQMHSRKHTGEKPYQCDFKDCERRFSRSDQLKRHQRRHTGVKPFQCKTCQRKFSRSDHLKTHTRTHTGKTSEKPFSCRWPSCQKKFARSDELVRHHNMHQRNMTKLQLAL

SEQ ID NO: 15840 - protein, 261 aa, Homo sapiens
MVVVAAAPNPADGTPKVLLLSGQPASAAGAPAGQALPLMVPAQRGASPEAASGGLPQARKRQRLTHLSPEEKALRRKLKNRVAAQTARDRKKARMSELEQQVVDLEEENQKLLLENQLLREKTHGLVVENQELRQRLGMDALVAEEEAEAKGNEVRPVAGSAESAALRLRAPLQQVQAQLSPLQNISPWILAVLTLQIQSLISCWAFWTTWTQSCSSNALPQSLPAWRSSQRSTQKDPVPYQPPFLCQWGRHQPSWKPLMN

SEQ ID NO: 15841 - protein, 324 aa, Homo sapiens
MSSEAETQQPPAAPPAAPALSAADTKPGTTGSGAGSGGPGGLTSAAPAGGDKKVIATKVLGTVKWFNVRNGYGFINRNDTKEDVFVHQTAIKKNNPRKYLRSVGDGETVEFDVVEGEKGAEAANVTGPGGVPVQGSKYAADRNHYRRYPRRRGPPRNYQQNYQNSESGEKNEGSESAPEGQAQQRRPYRRRRFPPYYMRRPYGRRPQYSNPPVQGEVMEGADNQGAGEQGRPVRQNMYRGYRPRFRRGPPRQRQPREDGNEEDKENQGDETQGQQPPQRRYRRNFNYRRRRPENPKPQDGKETKAADPPAENSSAPEAEQGGAE

SEQ ID NO: 15842 - protein, 364 aa, Homo sapiens
MSEVEAAAGATAVPAATVPATAAGVVAVVVPVPAGEPQKGGGAGGGGGAASGPAAGTPSAPGSRTPGNPATAVSGTPAPPARSQADKPVLAIQVLGTVKWFNVRNGYGFINRNDTKEDVFVHQTAIKRNNPRKFLRSVGDGETVEFDVVEGEKGAEATNVTGPGGVPVKGSRYAPNRRKSRRFIPRPPSVAPPPMVAEIPSAGTGPGSKGERAEDSGQRPRRWCPPPFFYRRRFVRGPRPPNQQQPIEGTDRVEPKETAPLEGHQQQGDERVPPPRFRPRYRRPFRPRPRQQPTTEGGDGETKPSQGPADGSRPEPQRPRNRPYFQRRRQQAPGPQQAPGPRQPAAPETSAPVNSGDPTTTILE

SEQ ID NO: 15843 - protein, 372 aa, Homo sapiens
MSEAGEATTTTTTTLPQAPTEAAAAAPQDPAPKSPVGSGAPQAAAPAPAAHVAGNPGGDAAPAATGTAAAASLATAAGSEDAEKKVLATKVLGTVKWFNVRNGYGFINRNDTKEDVFVHQTAIKKNNPRKYLRSVGDGETVEFDVVEGEKGAEAANVTGPDGVPVEGSRYAADRRRYRRGYYGRRRGPPRNYAGEEEEEGSGSSEGFDPPATDRQFSGARNQLRRPQYRPQYRQRRFPPYHVGQTFDRRSRVLPHPNRIQAGEIGEMKDGVPEGAQLQGPVHRNPTYRPRYRSRGPPRPRPAPAVGEAEDKENQQATSGPNQPSVRRGYRRPYNYRRRPRPPNAPSQDGKEAKAGEAPTENPAPPTQQSSAE

SEQ ID NO: 15844 - protein, 1422 aa, Homo sapiens
MSGIKRTIKETDPDYEDVSVALPNKRHKAIENSARDAAVQKIETIIKEQFALEMKNKEHEIEVIDQRLIEARRMMDKLRACIVANYYASAGLLKVSEGSKTCDTMVFNHPAIKKFLESPSRSSSPANQRAETPSANHSESDSLSQHNDFLSDKDNNSNMDIEERLSNNMEQRPSRNTGRDTSRITGSHKTEQRNADLTDETSRLFVKKTIVVGNVSKYIPPDKREENDQSTHKWMVYVRGSRREPSINHFVKKVWFFLHPSYKPNDLVEVREPPFHLTRRGWGEFPVRVQVHFKDSQNKRIDIIHNLKLDRTYTGLQTLGAETVVDVELHRHSLGEDCIYPQSSESDISDAPPSLPLTIPAPVKASSPIKQSHEPVPDTSVEKGFPASTEAERHTPFYALPSSLERTPTKMTTSQKVTFCSHGNSAFQPIASSCKIVPQSQVPNPESPGKSFQPITMSCKIVSGSPISTPSPSPLPRTPTSTPVHVKQGTAGSVINNPYVIMDKQPGQVIGATTPSTGSPTNKISTASQVSQGTGSPVPKIHGSSFVTSTVKQEDSLFASMPPLCPIGSHPKVQSPKPITGGLGAFTKVIIKQEPGEAPHVPATGAASQSPLPQYVTVKGGHMIAVSPQKQVITPGEGIAQSAKVQPSKVVGVPVGSALPSTVKQAVAISGGQILVAKASSSVSKAVGPKQVVTQGVAKAIVSGGGGTIVAQPVQTLTKAQVTAAGPQKSGSQGSVMATLQLPATNLANLANLPPGTKLYLTTNSKNPSGKGKLLLIPQGAILRATNNANLQSGSAASGGSGAGGGGGGGGGGGSGSGGGGSTGGGGGTAGGGTQSTAGPGGISQHLTYTSYILKQTPQGTFLVGQPSPQTSGKQLTTGSVVQGTLGVSTSSAQGQQTLKVISGQKTTLFTQAAHGGQASLMKISDSTLKTVPATSQLSKPGTTMLRVAGGVITTATSPAVALSANGPAQQSEGMAPVSSSTVSSVTKTSGQQQVCVSQATVGTCKAATPTVVSATSLVPTPNPISGKATVSGLLKIHSSQSSPQQAVLTIPSQLKPLSVNTSGGVQTILMPVNKVVQSFSTSKPPAILPVAAPTPVVPSSAPAAVAKVKTEPETPGPSCLSQEGQTAVKTEESSELGNYVIKIDHLETIQQLLTAVVKKIPLITAKSEDASCFSAKSVEQYYGWNIGKRRAAEWQRAMTMRKVLQEILEKNPRFHHLTPLKTKHIAHWCRCHGYTPPDPESLRNDGDSIEDVLTQIDSEPECPSSFSSADNLCRKLEDLQQFQKREPENEEEVDILSLSEPVKINIKKEQEEKQEEVKFYLPPTPGSEFIGDVTQKIGITLQPVALHRNVYASVVEDMILKATEQLVNDILRQALAVGYQTASHNRIPKEITVSNIHQAICNIPFLDFLTNKHMGILNEDQ

SEQ ID NO: 15845 - protein, 227 aa, Homo sapiens
MFKRMAEFGPDSGGRVKGVTIVKPIVYGNVARYFGKKREEDGHTHQWTVYVKPYRNEDMSAYVKKIQFKLHESYGNPLRVVTKPPYEITETGWGEFEIIIKIFFIDPNERPVTLYHLLKLFQSDTNAMLGKKTVVSEFYDEMIFQDPTAMMQQLLTTSRQLTLGAYKHETEFAELEVKTREKLEAAKKKTSFEIAELKERLKASRETINCLKNEIRKLEEDDQAKDI

SEQ ID NO: 15846 - protein, 414 aa, Homo sapiens
MASGDTLYIATDGSEMPAEIVELHEIEVETIPVETIETTVVGEEEEEDDDDEDGGGGDHGGGGGHGHAGHHHHHHHHHHHPPMIALQPLVTDDPTQVHHHQEVILVQTREEVVGGDDSDGLRAEDGFEDQILIPVPAPAGGDDDYIEQTLVTVAAAGKSGGGGSSSSGGGRVKKGGGKKSGKKSYLSGGAGAAGGGGADPGNKKWEQKQVQIKTLEGEFSVTMWSSDEKKDIDHETVVEEQIIGENSPPDYSEYMTGKKLPPGGIPGIDLSDPKQLAEFARMKPRKIKEDDAPRTIACPHKGCTKMFRDNSAMRKHLHTHGPRVHVCAECGKAFVESSKLKRHQLVHTGEKPFQCTFEGCGKRFSLDFNLRTHVRIHTGDRPYVCPFDGCNKKFAQSTNLKSHILTHAKAKNNQ

SEQ ID NO: 15847 - protein, 372 aa, Homo sapiens
MASNEDFSITQDLEIPADIVELHDINVEPLPMEDIPTESVQYEDVDGNWIYGGHNHPPLMVLQPLFTNTGYGDHDQEMLMLQTQEEVVGYCDSDNQLGNDLEDQLALPDSIEDEHFQMTLASLSASAASTSTSTQSRSKKPSKKPSGKSATSTEANPAGSSSSLGTRKWEQKQMQVKTLEGEFSVTMWSPNDNNDQGAVGEGQAENPPDYSEYLKGKKLPPGGLPGIDLSDPKQLAEFTKVKPKRSKGEPPKTVPCSYSGCEKMFRDYAAMRKHLHIHGPRVHVCAECGKAFLESSKLRRHQLVHTGEKPFQCTFEGCGKRFSLDFNLRTHLRIHTGDKPFVCPFDVCNRKFAQSTNLKTHILTHVKTKNNP

SEQ ID NO: 15848 - protein, 694 aa, Homo sapiens
MENKSLESSQTDLKLVAHPRAKSKVWKYFGFDTNAEGCILQWKKIYCRICMAQIAYSGNTSNLSYHLEKNHPEEFCEFVKSNTEQMREAFATAFSKLKPESSQQPGQDALAVKAGHGYDSKKQQELTAAVLGLICEGLYPASIVDEPTFKVLLKTADPRYELPSRKYISTKAIPEKYGAVREVILKELAEATWCGISTDMWRSENQNRAYVTLAAHFLGLGAPNCLSMGSRCLKTFEVPEENTAETITRVLYEVFIEWGISAKVFGATTNYGKDIVKACSLLDVAVHMPCLGHTFNAGIQQAFQLPKLGALLSRCRKLVEYFQQSAVAMYMLYEKQKQQNVAHCMLVSNRVSWWGSTLAMLQRLKEQQFVIAGVLVEDSNNHHLMLEASEWATIEGLVELLQPFKQVAEMLSASRYPTISMVKPLLHMLLNTTLNIKETDSKELSMAKEVIAKELSKTYQETPEIDMFLNVATFLDPRYKRLPFLSAFERQQVENRVVEEAKGLLDKVKDGGYRPAEDKIFPVPEEPPVKKLMRTSTPPPASVINNMLAEIFCQTGGVEDQEEWHAQVVEELSNFKSQKVLGLNEDPLKWWSDRLALFPLLPKVLQKYWCVTATRVAPERLFGSAANVVSAKRNRLAPAHVDEQVFLYENARSGAEAEPEDQDEGEWGLDQEQVFSLGDGVSGGFFGIRDSSFL

SEQ ID NO: 15849 - protein, 218 aa, Homo sapiens
MMRREDEEEEGTMMKAKGDLEMKEEEEISETGELVGPFVSAMPTPMPHNKGTRFSEAWEYFHLAPARAGHHPNQYATCRLCGRQVSRGPGVNVGTTALWKHLKSMHREELEKSGHGQAGQRQDPRPHGPQLPTGIEGNWGRLLEQVGTMALWASQREKEVLRRERAVEWRERAVEKRERALEEVERAILEMKWKVRAEKEACQREKELPAAVHPFHFV

SEQ ID NO: 15850 - protein, 234 aa, Homo sapiens
MRSGEPACTMDQARGLDDAAARGGQCPGLGPAPTPTPPGRLGAPYSEAWGYFHLAPGRPGHPSGHWATCRLCGEQVGRGPGFHAGTSALWRHLRSAHRRELESSGAGSSPPAAPCPPPPGPAAAPEGDWARLLEQMGALAVRGSRRERELERRELAVEQGERALERRRRALQEEERAAAQARRELQAEREALQARLRDVSRREGALGWAPAAPPPLKDDPEGDRDGCVITKVLL

SEQ ID NO: 15851 - protein, 1171 aa, Homo sapiens
MENNLKTCPKEDGDFVSDKIKFKIEEEDDDGIPPDSLERMDFKSEQEDMKQTDSGGERAGLGGTGCSCKPPGKYLSAESEDDYGALFSQYSSTLYDVAMEAVTQSLLSSRNMSSRKKSPAWKHFFISPRDSTKAICMYCVKEFSRGKNEKDLSTSCLMRHVRRAHPTVLIQENGSVSAVSSFPSPSLLLPPQPADAGDLSTILSPIKLVQKVASKIPSPDRITEESVSVVSSEEISSDMSVSEKCGREEALVGSSPHLPALHYDEPAENLAEKSLPLPKSTSGSRRRSAVWKHFYLSPLDNSKAVCIHCMNEFSRGKNGKDLGTSCLIRHMWRAHRAIVLQENGGTGIPPLYSTPPTLLPSLLPPEGELSSVSSSPVKPVRESPSASSSPDRLTEDLQSHLNPGDGLMEDVAAFSSSDDIGEASASSPEKQQADGLSPRLFESGAIFQQNKKVMKRLKSEVWHHFSLAPMDSLKAECRYCGCAISRGKKGDVGTSCLMRHLYRRHPEVVGSQKGFLGASLANSPYATLASAESSSSKLTDLPTVVTKNNQVMFPVNSKKTSKLWNHFSICSADSTKVVCLHCGRTISRGKKPTNLGTSCLLRHLQRFHSNVLKTEVSETARPSSPDTRVPRGTELSGASSFDDTNEKFYDSHPVAKKITSLIAEMIALDLQPYSFVDNVGFNRLLEYLKPQYSLPAPSYFSRTAIPGMYDNVKQIIMSHLKEAESGVIHFTSGIWMSNQTREYLTLTAHWVSFESPARPRCDDHHCSALLDVSQVDCDYSGNSIQKQLECWWEAWVTSTGLQVGITVTDNASIGKTLNEGEHSSVQCFSHTVNLIVSEAIKSQRMVQNLLSLARKICERVHRSPKAKEKLAELQREYALPQHHLIQDVPSKWSTSFHMLERLIEQKRAINEMSVECNFRELISCDQWEVMQSVCRALKPFEAASREMSTQMSTLSQVIPMVHILNRKVEMLFEETMGIDTMLRSLKEAMVSRLSATLHDPRYVFATLLDPRYKASLFTEEEAEQYKQDLIRELELMNSTSEDVAASHRCDAGSPSKDSAAEENLWSLVAKVKKKDPREKLPEAMVLAYLEEEVLEHSCDPLTYWNLKKASWPGLSALAVRFLGCPPSIVPSEKLFNTPTENGSLGQSRLMMEHFEKLIFLKVNLPLIYFQY

SEQ ID NO: 15852 - protein, 693 aa, Homo sapiens
MIAPLLCILSYNFNTFAILNVYSKLTMFCTTNSLPMDLLLKQGSLKQEVESFCYQIVSESNDQKVGILQSEDKQLQPSVSKKSEGELSRVKFISNSNKITFSKKPKRRKYDESYLSFGFTYFGNRDAPHAQCVLCKKILSNSSLAPSKLRRHLETKHAAYKDKDISFFKQHLDSPENNKPPTPKIVNTDNESATEASYNVSYHIALSGEAHTIGELLIKPCAKDVVMRMFDEQYSKKIDAVQLSNSTVARRIKDLAADIEEELVCRLKICDGFSLQLDESADVSGLAVLLVFVRYRFNKSIEEDLLLCESLQSNATGEEIFNCINSFMQKHEIEWEKCVDVCSDASRAVDGKIAEAVTLIKYVAPESTSSHCLLYRHALAVKIMPTSLKNVLDQAVQIINYIKARPHQSRLLKILCEEMGAQHTALLLNTEVRWLSRGKVLVRLFELRRELLVFMDSAFRLSDCLTNSSWLLRLAYLADIFTKLNEVNLSMQGKNVTVFTVFDKMSSLLRKLEFWASSVEEENFDCFPTLSDFLTEINSTVDKDICSAIVQHLRGLRATLLKYFPVTNDNNAWVRNPFTVTVKPASLVARDYESLIDLTSDSQVKQNFSELSLNDFWSSLIQEYPSIARRAVRVLLPFATMHLCETGFSYYAATKTKYRKRLDAAPHMRIRLSNITPNIKRICDKKTQKHCSH

SEQ ID NO: 15853 - protein, 979 aa, Homo sapiens
MSVCTLSVPVSSLSPGRRCNTFSDSGILGCVPINSNTDEEDVVEEKMVAEGVNKEAKQPAKKKRKKGLRIKGKRRRKKLILAKKFSKDLGSGRPVADAPALLASNDPEQDEESLFESNIEKQIYLPSTRAKTSIVWHFFHVDPQYTWRAICNLCEKSVSRGKPGSHLGTSTLQRHLQARHSPHWTRANKFGVASGEEDFTLDVSLSPSSGSNGSFEYIPTDPLDDNRMGKKHDKSASDALRAERGRFLIKSNIVKHALIPGTRAKTSAVWNFFYTDPQHISRAVCNICKRSVSRGRPGSHLGTSTLQRHLQATHPIHWAVANKDSGAVANGLDEAETERSDLLSDTLHGEKSTGSQDLTAEDLSDSDSDEPMLEVENRSESPIPVAEQGTLMRAQERETTCCGNPVSSHISQAIIQMIVEDMHPYNYFSTPAFQRFMQIVAPDYRLPSETYFFTKAVPQLYDCVREKIFLTLENVQSQKIHLTVDIWTHDPSTDYFIVTVHWVSLETASFLNNGRIPDFRKWAVLCVTGLAKDCLITNILQELNDQIGLWLSPNFLIPSFIVSDNSSNVVHAIKDGGFTHVPCFLHCLNMVIQDFFCEHKSIENMLVAARKTCHHFSHSVKARQILQEFQNDHQLPWKNLKQDETGHWISTFYMLKWLLEHCYSVHHSLGRASGVVLTSLQWTLMTYVCDILKPFEEATQKVSVKTAGLNQVLPLIHHLLLSLQKLREDFQVRGITQALNLVDSLSLKLETDTLLSAMLKSKPCILATLLDPCFKNSLEDFFPQGADLETYKQFLAEEVCNYMESSPEICQIPTSEASCPSVTVGADSFTSSLKEGTSSSGSVDSSAVDNVALGSKSFMFPSAVAVVDEYFKEKYSEFSGGDDPLIYWQRKISIWPALTQVAIQYLSCPMCSWQSECIFTKNSHFHPKQIMSLDFDNIEQLMFLKMNLKNVNYDYSTLVLSWDPEQNEVVQSSEKEILP

SEQ ID NO: 15854 - protein, 429 aa, Homo sapiens
MAQAPADPGREGHLEQRILQVLTEAGSPVKLAQLVKECQAPKRELNQVLYRMKKELKVSLTSPATWCLGGTDPEGEGPAELALSSPAERPQQHAATIPETPGPQFSQQREEDIYRFLKDNGPQRALVIAQALGMRTAKDVNRDLYRMKSRHLLDMDEQSKAWTIYRPEDSGRRAKSASIIYQHNPINMICQNGPNSWISIANSEAIQIGHGNIITRQTVSREDGSAGPRHLPSMAPGDSSTWGTLVDPWGPQDIHMEQSILRRVQLGHSNEMRLHGVPSEGPAHIPPGSPPVSATAAGPEASFEARIPSPGTHPEGEAAQRIHMKSCFLEDATIGNSNKMSISPGVAGPGGVAGSGEGEPGEDAGRRPADTQSRSHFPRDIGQPITPSHSKLTPKLETMTLGNRSHKAAEGSHYVDEASHEGSWWGGGI

SEQ ID NO: 15855 - protein, 577 aa, Homo sapiens
MNKLYIGNLNESVTPADLEKVFAEHKISYSGQFLVKSGYAFVDCPDEHWAMKAIETFSGKVELQGKRLEIEHSVPKKQRSRKIQIRNIPPQLRWEVLDSLLAQYGTVENCEQVNTESETAVVNVTYSNREQTRQAIMKLNGHQLENHALKVSYIPDEQIAQGPENGRRGGFGSRGQPRQGSPVAAGAPAKQQQVDIPLRLLVPTQYVGAIIGKEGATIRNITKQTQSKIDVHRKENAGAAEKAISVHSTPEGCSSACKMILEIMHKEAKDTKTADEVPLKILAHNNFVGRLIGKEGRNLKKVEQDTETKITISSLQDLTLYNPERTITVKGAIENCCRAEQEIMKKVREAYENDVAAMSLQSHLIPGLNLAAVGLFPASSSAVPPPPSSVTGAAPYSSFMQAPEQEMVQVFIPAQAVGAIIGKKGQHIKQLSRFASASIKIAPPETPDSKVRMVIITGPPEAQFKAQGRIYGKLKEENFFGPKEEVKLETHIRVPASAAGRVIGKGGKTVNELQNLTAAEVVVPRDQTPDENDQVIVKIIGHFYASQMAQRKIRDILAQVKQQHQKGQSNQAQARRK

SEQ ID NO: 15856 - protein, 713 aa, Homo sapiens
MAKPSHSSYVLQQLNNQREWGFLCDCCIAIDDIYFQAHKAVLAACSSYFRMFFMNHQHSTAQLNLSNMKISAECFDLILQFMYLGKIMTAPSSFEQFKVAMNYLQLYNVPDCLEDIQDADCSSSKCSSSASSKQNSKMIFGVRMYEDTVARNGNEANRWCAEPSSTVNTPHNREADEESLQLGNFPEPLFDVCKKSSVSKLSTPKERVSRRFGRSFTCDSCGFGFSCEKLLDEHVLTCTNRHLYQNTRSYHRIVDIRDGKDSNIKAEFGEKDSSKTFSAQTDKYRGDTSQAADDSASTTGSRKSSTVESEIASEEKSRAAERKRIIIKMEPEDIPTDELKDFNIIKVTDKDCNESTDNDELEDEPEEPFYRYYVEEDVSIKKSGRKTLKPRMSVSADERGGLENMRPPNNSSPVQEDAENASCELCGLTITEEDLSSHYLAKHIENICACGKCGQILVKGRQLQEHAQRCGEPQDLTMNGLGNTEEKMDLEENPDEQSEIRDMFVEMLDDFRDNHYQINSIQKKQLFKHSACPFRCPNCGQRFETENLVVEHMSSCLDQDMFKSAIMEENERDHRRKHFCNLCGKGFYQRCHLREHYTVHTKEKQFVCQTCGKQFLRERQLRLHNDMHKGMARYVCSICDQGNFRKHDHVRHMISHLSAGETICQVCFQIFPNNEQLEQHMDVHLYTCGICGAKFNLRKDMRSHYNAKHLKRT

SEQ ID NO: 15857 - protein, 871 aa, Homo sapiens
MSFSEMNRRTLAFRGGGLVTASGGGSTNNNAGGEASAWPPQPQPRQPPPPAPPALQPPNGRGADEEVELEGLEPQDLEASAGPAAGAAEEAKELLLPQDAGGPTSLGGGAGGPLLAERNRRTLAFRGGGGGGLGNNGSSRGRPETSVWPLRHFNGRGPATVDLELDALEGKELMQDGASLSDSTEDEEEGASLGDGSGAEGGSCSSSRRSGGDGGDEVEGSGVGAGEGETVQHFPLARPKSLMQKLQCSFQTSWLKDFPWLRYSKDTGLMSCGWCQKTPADGGSVDLPPVGHDELSRGTRNYKKTLLLRHHVSTEHKLHEANAQESEIPSEEGYCDFNSRPNENSYCYQLLRQLNEQRKKGILCDVSIVVSGKIFKAHKNILVAGSRFFKTLYCFSNKESPNQNNTTHLDIAAVQGFSVILDFLYSGNLVLTSQNAIEVMTVASYLQMSEVVQTCRNFIKDALNISIKSEAPESVVVDYNNRKPVNRDGLSSSRDQKIASFWATRNLTNLASNVKIENDGCNVDEGQIENYQMNDSSWVQDGSPEMAENESEGQTKVFIWNNMGSQGIQETGKTRRKNQTTKRFIYNIPPNNETNLEDCSVMQPPVAYPEENTLLIKEEPDLDGALLSGPDGDRNVNANLLAEAGTSQDGGDAGTSHDFKYGLMPGPSNDFKYGLIPGTSNDFKYGLIPGASNDFKYGLLPESWPKQETWENGESSLIMNKLKCPHCSYVAKYRRTLKRHLLIHTGVRSFSCDICGKLFTRREHVKRHSLVHKKDKKYKCMVCKKIFMLAASVGIRHGSRRYGVCVDCADKSQPGGQEGVDQGQDTEFPRDEEYEENEVGEADEELVDDGEDQNDPSRWDESGEVCMSLDD

SEQ ID NO: 15858 - protein, 1053 aa, Homo sapiens
MSSEESYRAILRYLTNEREPYAPGTEGNVKRKIRKAAACYVVRGGTLYYQRRQRHRKTFAELEVVLQPERRRDLIEAAHLGPGGTHHTRHQTWHYLSKTYWWRGILKQVKDYIKQCSKCQEKLDRSRPISDVSEMLEELGLDLESGEESNESEDDLSNFTSSPTTASKPAKKKPVSKHELVFVDTKGVVKRSSPKHCQAVLKQLNEQRLSNQFCDVTLLIEGEEYKAHKSVLSANSEYFRDLFIEKGAVSSHEAVVDLSGFCKASFLPLLEFAYTSVLSFDFCSMADVAILARHLFMSEVLEICESVHKLMEEKQLTVYKKGEVQTVASTQDLRVQNGGTAPPVASSEGTTTSLPTELGDCEIVLLVNGELPEAEQNGEVGRQPEPQVSSEAESALSSVGCIADSHPEMESVDLITKNNQTELETSNNRENNTVSNIHPKLSKENVISSSPEDSGMGNDISAEDICAEDIPKHRQKVDQPLKDQENLVASTAKTDFGPDDDTYRSRLRQRSVNEGAYIRLHKGMEKKLQKRKAVPKSAVQQVAQKLVQRGKKMKQPKRDAKENTEEASHKCGECGMVFQRRYALIMHKLKHERARDYKCPLCKKQFQYSASLRAHLIRHTRKDAPSSSSSNSTSNEASGTSSEKGRTKREFICSICGRTLPKLYSLRIHMLKHTGVKPHACQVCGKTFIYKHGLKLHQSLHQSQKQFQCELCVKSFVTKRSLQEHMSIHTGESKYLCSVCGKSFHRGSGLSKHFKKHQPKPEVRGYHCTQCEKSFFEARDLRQHMNKHLGVKPFQCQFCDKCYSWKKDWYSHVKSHSVTEPYRCNICGKEFYEKALFRRHVKKATHGKKGRAKQNLERVCEKCGRKFTQLREYRRHMNNHEGVKPFECLTCGVAWADARSLKRHVRTHTGERPYVCPVCSEAYIDARTLRKHMTKFHRDYVPCKIMLEKDTLQFHNQGTQVAHAVSILTAGMQEQESSGPQELETVVVTGETMEALEAVAATEEYPSVSTLSDQSIMQVVNYVLAQQQGQKLSEVAEAIQTVKVEVAHISGGE

SEQ ID NO: 15859 - protein, 459 aa, Homo sapiens
MASGVEVLRFQLPGHEAATLRNMNQLRAEERFCDVTIVADSLKFRGHKVILAACSPFLRDQFLLNPSSELQVSLMHSARIVADLLLSCYTGALEFAVRDIVNYLTAASYLQMEHVVEKCRNALSQFIEPKIGLKEDGVSEASLVSSISATKSLLPPARTPKPAPKPPPPPPLPPPLLRPVKLEFPLDEDLELKAEEEDEDEDEDVSDICIVKVESALEVAHRLKPPGGLGGGLGIGGSVGGHLGELAQSSVPPSTVAPPQGVVKACYSLSEDAEGEGLLLIPGGRASVGATSGLVEAAAVAMAARGAGGSLGAGGSRGPLPGGFSGGNPLKNIKCTKCPEVFQGVEKLVFHMRAQHFIFMCPRCGKQFNHSSNLNRHMNVHRGVKSHSCGICGKCFTQKSTLHDHLNLHSGARPYRCSYCDVRFAHKPAIRRHLKEQHGKTTAENVLEASVAEINVLIR

SEQ ID NO: 15860 - protein, 449 aa, Homo sapiens
MEFFISMSETIKYNDDDHKTLFLKTLNEQRLEGEFCDIAIVVEDVKFRAHRCVLAACSTYFKKLFKKLEVDSSSVIEIDFLRSDIFEEVLNYMYTAKISVKKEDVNLMMSSGQILGIRFLDKLCSQKRDVSSPDENNGQSKSKYCLKINRPIGDAADTQDDDVEEIGDQDDSPSDDTVEGTPPSQEDGKSPTTTLRVQEAILKELGSEEVRKVNCYGQEVESMETPESKDLGSQTPQALTFNDGMSEVKDEQTPGWTTAASDMKFEYLLYGHHREQIACQACGKTFSDEGRLRKHEKLHTADRPFVCEMCTKGFTTQAHLKEHLKIHTGYKPYSCEVCGKSFIRAPDLKKHERVHSNERPFACHMCDKAFKHKSHLKDHERRHRGEKPFVCGSCTKAFAKASDLKRHENNMHSERKQVTPSAIQSETEQLQAAAMAAEAEQQLETIACS

SEQ ID NO: 15861 - protein, 673 aa, Homo sapiens; identical to SEQ ID NO: 15499

SEQ ID NO: 15862 - protein, 803 aa, Homo sapiens
MDFPQHSQHVLEQLNQQRQLGLLCDCTFVVDGVHFKAHKAVLAACSEYFKMLFVDQKDVVHLDISNAAGLGQVLEFMYTAKLSLSPENVDDVLAVATFLQMQDIITACHALKSLAEPATSPGGNAEALATEGGDKRAKEEKVATSTLSRLEQAGRSTPIGPSRDLKEERGGQAQSAASGAEQTEKADAPREPPPVELKPDPTSGMAAAEAEAALSESSEQEMEVEPARKGEEEQKEQEEQEEEGAGPAEVKEEGSQLENGEAPEENENEESAGTDSGQELGSEARGLRSGTYGDRTESKAYGSVIHKCEDCGKEFTHTGNFKRHIRIHTGEKPFSCRECSKAFSDPAACKAHEKTHSPLKPYGCEECGKSYRLISLLNLHKKRHSGEARYRCEDCGKLFTTSGNLKRHQLVHSGEKPYQCDYCGRSFSDPTSKMRHLETHDTDKEHKCPHCDKKFNQVGNLKAHLKIHIADGPLKCRECGKQFTTSGNLKRHLRIHSGEKPYVCIHCQRQFADPGALQRHVRIHTGEKPCQCVMCGKAFTQASSLIAHVRQHTGEKPYVCERCGKRFVQSSQLANHIRHHDNIRPHKCSVCSKAFVNVGDLSKHIIIHTGEKPYLCDKCGRGFNRVDNLRSHVKTVHQGKAGIKILEPEEGSEVSVVTVDDMVTLATEALAATAVTQLTVVPVGAAVTADETEVLKAEISKAVKQVQEEDPNTHILYACDSCGDKFLDANSLAQHVRIHTAQALVMFQTDADFYQQYGPGGTWPAGQVLQAGELVFRPRDGAEGQPALAETSPTAPECPPPAE

SEQ ID NO: 15863 - protein, 522 aa, Homo sapiens
MEFPDHSRHLLQCLSEQRHQGFLCDCTVLVGDAQFRAHRAVLASCSMYFHLFYKDQLDKRDIVHLNSDIVTAPAFALLLEFMYEGKLQFKDLPIEDVLAAASYLHMYDIVKVCKKKLKEKATTEADSTKKEEDASSCSDKVESLSDGSSHIAGDLPSDEDEGEDEKLNILPSKRDLAAEPGNMWMRLPSDSAGIPQAGGEAEPHATAAGKTVASPCSSTESLSQRSVTSVRDSADVDCVLDLSVKSSLSGVENLNSSYFSSQDVLRSNLVQVKVEKEASCDESDVGTNDYDMEHSTVKESVSTNNRVQYEPAHLAPLREDSVLRELDREDKASDDEMMTPESERVQVEGGMESSLLPYVSNILSPAGQIFMCPLCNKVFPSPHILQIHLSTHFREQDGIRSKPAADVNVPTCSLCGKTFSCMYTLKRHERTHSGEKPYTCTQCGKSFQYSHNLSRHAVVHTREKPHACKWCERRFTQSGDLYRHIRKFHCELVNSLSVKSEALSLPTVRDWTLEDSSQELWK

SEQ ID NO: 15864 - protein, 514 aa, Homo sapiens
MDLANHGLILLQQLNAQREFGFLCDCTVAIGDVYFKAHKSVLASFSNYFKMLFVHQTSECVRLKPTDIQPDIFSYLLHLMYTGKMAPQLIDPVRLEQGIKFLHAYPLIQEASLASQGAFSHPDQVFPLASSLYGIQIADHQLRQATKIASAPEKLGRDPRPQTSRISQEQVPEASQLSQLTSNLAQVNRTNMTPSDPLQTSLSPELVSTPVPPPPPGEETNLEASSSDEQPASLTIAHVKPSIMKRNGSFPKYYACHLCGRRFTLRSSLREHLQIHTGVPFTSSQQGESRVPLTLCSNAADLGKDAMEVPEAGMISDSELQHISDSPIIDGQQQSETPPPSDIADIDNLEQADQEREVKRRKYECTICGRKFIQKSHWREHMYIHTGKPFKCSTCDKSFCRANQAARHVCLNQSIDTYTMVDKQTLELCTFEEGSQMDNMLVQTNKPYKCNLCDKTFSTPNEVVKHSCQNQNSDVFALDEGRSILLGSGDSEVTEPDHPVLASIKKEQETVLLD

SEQ ID NO: 15865 - protein, 741 aa, Homo sapiens
MLERKKPKTAENQKASEENEITQPGGSSAKPGLPCLNFEAVLSPDPALIHSTHSLTNSHAHTGSSDCDISCKGMTERIHSINLHNFSNSVLETLNEQRNRGHFCDVTVRIHGSMLRAHRCVLAAGSPFFQDKLLLGYSDIEIPSVVSVQSVQKLIDFMYSGVLRVSQSEALQILTAASILQIKTVIDECTRIVSQNVGDVFPGIQDSGQDTPRGTPESGTSGQSSDTESGYLQSHPQHSVDRIYSALYACSMQNGSGERSFYSGAVVSHHETALGLPRDHHMEDPSWITRIHERSQQMERYLSTTPETTHCRKQPRPVRIQTLVGNIHIKQEMEDDYDYYGQQRVQILERNESEECTEDTDQAEGTESEPKGESFDSGVSSSIGTEPDSVEQQFGPGAARDSQAEPTQPEQAAEAPAEGGPQTNQLETGASSPERSNEVEMDSTVITVSNSSDKSVLQQPSVNTSIGQPLPSTQLYLRQTETLTSNLRMPLTLTSNTQVIGTAGNTYLPALFTTQPAGSGPKPFLFSLPQPLAGQQTQFVTVSQPGLSTFTAQLPAPQPLASSAGHSTASGQGEKKPYECTLCNKTFTAKQNYVKHMFVHTGEKPHQCSICWRSFSLKDYLIKHMVTHTGVRAYQCSICNKRFTQKSSLNVHMRLHRGEKSYECYICKKKFSHKTLLERHVALHSASNGTPPAGTPPGARAGPPGVVACTEGTTYVCSVCPAKFDQIEQFNDHMRMHVSDG

SEQ ID NO: 15866 - protein, 1066 aa, Homo sapiens
MEGLLHYINPAHAISLLSALNEERLKGQLCDVLLIVGDQKFRAHKNVLAASSEYFQSLFTNKENESQTVFQLDFCEPDAFDNVLNYIYSSSLFVEKSSLAAVQELGYSLGISFLTNIVSKTPQAPFPTCPNRKKVFVEDDENSSQKRSVIVCQSRNEAQGKTVSQNQPDVSHTSRPSPSIAVKANTNKPHVPKPIEPLHNLSLTEKSWPKDSSVVYAKSLEHSGSLDDPNRISLVKRNAVLPSKPLQDREAMDDKPGVSGQLPKGKALELALKRPRPPVLSVCSSSETPYLLKETNKGNGQGEDRNLLYYSKLGLVIPSSGSGSGNQSIDRSGPLVKSLLRRSLSMDSQVPVYSPSIDLKSSQGSSSVSSDAPGNVLCALSQKSSLKDCSEKTALDDRPQVLQPHRLRSFSASQSTDREGASPVTEVRIKTEPSSPLSDPSDIIRVTVGDAATTAAASSSSVTRDLSLKTEDDQKDMSRLPAKRRFQADRRLPFKKLKVNEHGSPVSEDNFEEGSSPTLLDADFPDSDLNKDEFGELEGTRPNKKFKCKHCLKIFRSTAGLHRHVNMYHNPEKPYACDICHKRFHTNFKVWTHCQTQHGIVKNPSPASSSHAVLDEKFQRKLIDIVREREIKKALIIKLRRGKPGFQGQSSSQAQQVIKRNLRSRAKGAYICTYCGKAYRFLSQFKQHIKMHPGEKPLGVNKVAKPKEHAPLASPVENKEVYQCRLCNAKLSSLLEQGSHERLCRNAAVCPYCSLRFFSPELKQEHESKCEYKKLTCLECMRTFKSSFSIWRHQVEVHNQNNMAPTENFSLPVLDHNGDVTGSSRPQSQPEPNKVNHIVTTKDDNVFSDSSEQVNFDSEDSSCLPEDLSLSKQLKIQVKEEPVEEAEEEAPEASTAPKEAGPSKEASLWPCEKCGKMFTVHKQLERHQELLCSVKPFICHVCNKAFRTNFRLWSHFQSHMSQASEESAHKESEVCPVPTNSPSPPPLPPPPPLPKIQPLEPDSPTGLSENPTPATEKLFVPQESDTLFYHAPPLSAITFKRQFMCKLCHRTFKTAFSLWSHEQTHN

SEQ ID NO: 15867 - protein, 634 aa, Homo sapiens
MEPSPLSPSGAALPLPLSLAPPPLPLPAAAVVHVSFPEVTSALLESLNQQRLQGQLCDVSIRVQGREFRAHRAVLAASSPYFHDQVLLKGMTSISLPSVMDPGAFETVLASAYTGRLSMAAADIVNFLTVGSVLQMWHIVDKCTELLREGRASATTTITTAAATSVTVPGAGVPSGSGGTVAPATMGSARSHASSRASENQSPSSSNYFSPRESTDFSSSSQEAFAASAVGSGERRGGGPVFPAPVVGSGGATSGKLLLEADELCDDGGDGRGAVVPGAGLRRPTYTPPSIMPQKHWVYVKRGGNCPAPTPLVPQDPDLEEEEEEEDLVLTCEDDEDEELGGSSRVPVGGGPEATLSISDVRTLSEPPDKGEEQVNFCESSNDFGPYEGGGPVAGLDDSGGPTPSSYAPSHPPRPLLPLDMQGNQILVFPSSSSSSSSQAPGQPPGNQAEHGAVTVGGTSVGSLGVPGSVGGVPGGTGSGDGNKIFLCHCGKAFSHKSMRDRHVNMHLNLRPFDCPVCNKKFKMKHHLTEHMKTHTGLKPYECGVCAKKFMWRDSFMRHRGHCERRHRLGGVGAVPGPGTPTGPSLPSKRESPGVGGGSGDEASAATPPSSRRVWSPPRVHKVEMGFGGGGGAN

SEQ ID NO: 15868 - protein, 697 aa, Homo sapiens
MAETSPEPSGQLVVHSDAHSDTVLASFEDQRKKGFLCDITLIVENVHFRAHKALLAASSEYFSMMFAEEGEIGQSIYMLEGMVADTFGILLEFIYTGYLHASEKSTEQILATAQFLKVYDLVKAYTDFQNNHSSPKPTTLNTAGAPVVVISNKKNDPPKRKRGRPKKVNTLQEEKSELAAEEEIQLRVNNSVQNRQNFVVKGDSGVLNEQIAAKEKEESEPTCEPSREEEMPVEKDENYDPKTEDGQASQSRYSKRRIWRSVKLKDYKLVGDQEDHGSAKRICGRRKRPGGPEARCKDCGKVFKYNHFLAIHQRSHTGERPFKCNECGKGFAQKHSLQVHTRMHTGERPYTCTVCSKALTTKHSLLEHMSLHSGQKSFTCDQCGKYFSQNRQLKSHYRVHTGHSLPECKDCHRKFMDVSQLKKHLRTHTGEKPFTCEICGKSFTAKSSLQTHIRIHRGEKPYSCGICGKSFSDSSAKRRHCILHTGKKPFSCPECNLQFARLDNLKAHLKIHSKEKHASDASSISGSSNTEEVRNILQLQPYQLSTSGEQEIQLLVTDSVHNINFMPGPSQGISIVTAESSQNMTADQAANLTLLTQQPEQLQNLILSAQQEQTEHIQSLNMIESQMGPSQTEPVHVITLSKETLEHLHAHQEQTEELHLATSTSDPAQHLQLTQEPGPPPPTHHVPQPTPLGQEQS

SEQ ID NO: 15869 - protein, 435 aa, Homo sapiens
MDTASHSLVLLQQLNMQREFGFLCDCTVAIGDVYFKAHRAVLAAFSNYFKMIFIHQTSECIKIQPTDIQPDIFSYLLHIMYTGKGPKQIVDHSRLEEGIRFLHADYLSHIATEMNQVFSPETVQSSNLYGIQISTTQKTVVKQGLEVKEAPSSNSGNRAAVQGDHPQLQLSLAIGLDDGTADQQRACPATQALEEHQKPPVSIKQERCDPESVISQSHPSPSSEVTGPTFTENSVKIHLCHYCGERFDSRSNLRQHLHTHVSGSLPFGVPASILESNDLGEVHPLNENSEALECRRLSSFIVKENEQQPDHTNRGTTEPLQISQVSLISKDTEPVELNCNFSFSRKRKMSCTICGHKFPRKSQLLEHMYTHKGKSYRYNRCQRFGNALAQRFQPYCDSWSDVSLKSSRLSQEHLDLPCALESELTQENVDTILVE

SEQ ID NO: 15870 - protein, 441 aa, Homo sapiens
MSERSDLLHFKFENYGDSMLQKMNKLREENKFCDVTVLIDDIEVQGHKIVFAAGSPFLRDQFLLNDSREVKISILQSSEVGRQLLLSCYSGVLEFPEMELVNYLTAASFLQMSHIVERCTQALWKFIKPKQPMDSKEGCEPQSASPQSKEQQGDARGSPKQDSPCIHPSEDSMDMEDSDIQIVKVESIGDVSEVRSKKDQNQFISSEPTALHSSEPQHSLINSTVENRVSEIEQNHLHNYALSYTGSDNIIMASKDVFGPNIRGVDKGLQWHHQCPKCTRVFRHLENYANHLKMHKLFMCLLCGKTFTQKGNLHRHMRVHAGIKPFQCKICGKTFSQKCSLQDHLNLHSGDKPHKCNYCDMVFAHKPVLRKHLKQLHGKNSFDNANERNVQDLTVDFDSFACTTVTDSKGCQPQPDATQVLDAGKLAQAVLNLRNDSTCVN

SEQ ID NO: 15871 - protein, 574 aa, Homo sapiens
MLREFSKWGVEASPGKAWERKRSLLRGAVGRYRGATGGDLFWAPFPSWGTMEFPEHSQQLLQSLREQRSQGFLCDCTVMVGSTQFLAHRAVLASCSPFFQLFYKERELDKRDLVCIHNEIVTAPAFGLLLDFMYAGQLTLRGDTPVEDVLAAASYLHMNDIVKVCKRRLQARALAEADSTKKEEETNSQLPSLEFLSSTSRGTQPSLASAETSGHWGKGEWKGSAAPSPTVRPPDEPPMSSGADTTQPGMEVDAPHLRAPHPPVADVSLASPSSSTETIPTNYFSSGISAVSLEPLPSLDVGPESLRVVEPKDPGGPLQGFYPPASAPTSAPAPVSAPVPSQAPAPAEAELVQVKVEAIVISDEETDVSDEQPQGPERAFPSGGAVYGAQPSQPEAFEDPGAAGLEEVGPSDHFLPTDPHLPYHLLPGAGQYHRGLVTSPLPAPASLHEPLYLSSEYEAAPGSFGVFTEDVPTCKTCGKTFSCSYTLRRHATVHTRERPYECRYCLRSYTQSGDLYRHIRKAHNEDLAKRSKPDPEVGPLLGVQPLPGSPTADRQSSSGGGPPKDFVLAPKTNI

SEQ ID NO: 15872 - protein, 487 aa, Homo sapiens
MSLPPIRLPSPYGSDRLVQLAARLRPALCDTLITVGSQEFPAHSLVLAGVSQQLGRRGQWALGEGISPSTFAQLLNFVYGESVELQPGELRPLQEAARALGVQSLEEACWRARGDRAKKPDPGLKKHQEEPEKPSRNPERELGDPGEKQKPEQVSRTGGREQEMLHKHSPPRGRPEMAGATQEAQQEQTRSKEKRLQAPVGQRGADGKHGVLTWLRENPGGSEESLRKLPGPLPPAGSLQTSVTPRPSWAEAPWLVGGQPALWSILLMPPRYGIPFYHSTPTTGAWQEVWREQRIPLSLNAPKGLWSQNQLASSSPTPGSLPQGPAQLSPGEMEESDQGHTGALATCAGHEDKAGCPPRPHPPPAPPARSRPYACSVCGKRFSLKHQMETHYRVHTGEKPFSCSLCPQRSRDFSAMTKHLRTHGAAPYRCSLCGAGCPSLASMQAHMRGHSPSQLPPGWTIRSTFLYSSSRPSRPSTSPCCPSSSTT

SEQ ID NO: 15873 - protein, 672 aa, Homo sapiens
MESRKLISATDIQYSGSLLNSLNEQRGHGLFCDVTVIVEDRKFRAHKNILSASSTYFHQLFSVAGQVVELSFIRAEIFAEILNYIYSSKIVRVRSDLLDELIKSGQLLGVKFIAELGVPLSQVKSISGTAQDGNTEPLPPDSGDKNLVIQKSKDEAQDNGATIMPIITESFSLSAEDYEMKKIIVTDSDDDDDDVIFCSEILPTKETLPSNNTVAQVQSNPGPVAISDVAPSASNNSPPLTNITPTQKLPTPVNQATLSQTQGSEKLLVSSAPTHLTPNIILLNQTPLSTPPNVSSSLPNHMPSSINLLVQNQQTPNSAILTGNKANEEEEEEIIDDDDDTISSSPDSAVSNTSLVPQADTSQNTSFDGSLIQKMQIPTLLQEPLSNSLKISDIITRNTNDPGVGSKHLMEGQKIITLDTATEIEGLSTGCKVYANIGEDTYDIVIPVKDDPDEGEARLENEIPKTSGSEMANKRMKVKHDDHYELIVDGRVYYICIVCKRSYVCLTSLRRHFNIHSWEKKYPCRYCEKVFPLAEYRTKHEIHHTGERRYQCLACGKSFINYQFMSSHIKSVHSQDPSGDSKLYRLHPCRSLQIRQYAYLSDRSSTIPAMKDDGIGYKVDTGKEPPVGTTTSTQNKPMTWEDIFIQQENDSIFKQNVTDGSTEFEFIIPESY

SEQ ID NO: 15874 - protein, 500 aa, Homo sapiens
MDSSSFIQFDVPEYSSTVLSQLNELRLQGKLCDIIVHIQGQPFRAHKAVLAASSPYFRDHSALSTMSGLSISVIKNPNVFEQLLSFCYTGRMSLQLKDVVSFLTAASFLQMQCVIDKCTQILESIHSKISVGDVDSVTVGAEENPESRNGVKDSSFFANPVEISPPYCSQGRQPTASSDLRMETTPSKALRSRLQEEGHSDRGSSGSVSEYEIQIEGDHEQGDLLVRESQITEVKVKMEKSDRPSCSDSSSLGDDGYHTEMVDGEQVVAVNVGSYGSVLQHAYSYSQAASQPTNVSEAFGSLSNSSPSRSMLSCFRGGRARQKRALSVHLHSDLQGLVQGSDSEAMMNNPGYESSPRERSARGHWYPYNERLICIYCGKSFNQKGSLDRHMRLHMGITPFVCKFCGKKYTRKDQLEYHIRGHTDDKPFRCEICGKCFPFQGTLNQHLRKNHPGVAEVRSRIESPERTDVYVEQKLENDASASEMGLDSRMEIHTVSDAPD

SEQ ID NO: 15875 - protein, 503 aa, Homo sapiens
MEKGGNIQLEIPDFSNSVLSHLNQLRMQGRLCDIVVNVQGQAFRAHKVVLAASSPYFRDHMSLNEMSTVSISVIKNPTVFEQLLSFCYTGRICLQLADIISYLTAASFLQMQHIIDKCTQILEGIHFKINVAEVEAELSQTRTKHQERPPESHRVTPNLNRSLSPRHNTPKGNRRGQVSAVLDIRELSPPEESTSPQIIEPSSDVESREPILRINRAGQWYVETGVADRGGRSDDEVRVLGAVHIKTENLEEWLGPENQPSGEDGSSAEEVTAMVIDTTGHGSVGQENYTLGSSGAKVARPTSSEVDRFSPSGSVVPLTERHRARSESPGRMDEPKQPSSQVEESAMMGVSGYVEYLREQEVSERWFRYNPRLTCIYCAKSFNQKGSLDRHMRLHMGITPFVCRMCGKKYTRKDQLEYHIRKHTGNKPFHCHVCGKSFPFQAILNQHFRKNHPGCIPLEGPHSISPETTVTSRGQAEEESPSQEETVAPGEAVQGSVSTTGPD

SEQ ID NO: 15876 - protein, 1195 aa, Homo sapiens
MTVMSLSRDLKDDFHSDTVLSILNEQRIRGILCDVTIIVEDTKFKAHSNVLAASSLYFKNIFWSHTICISSHVLELDDLKAEVFTEILNYIYSSTVVVKRQETVTDLAAAGKKLGISFLEDLTDRNFSNSPGPYVFCITEKGVVKEEKNEKRHEEPAITNGPRITNAFSIIETENSNNMFSPLDLRASFKKVSDSMRTASLCLERTDVCHEAEPVRTLAEHSYAVSSVAEAYRSQPVREHDGSSPGNTGKENCEALAAKPKTCRKPKTFSIPQDSDSATENIPPPPVSNLEVNQERSPQPAAVLTRSKSPNNEGDVHFSREDENQSSDVPGPPAAEVPPLVYNCSCCSKAFDSSTLLSAHMQLHKPTQEPLVCKYCNKQFTTLNRLDRHEQICMRSSHMPIPGGNQRFLENYPTIGQNGGSFTGPEPLLSENRIGEFSSTGSTLPDTDHMVKFVNGQMLYSCVVCKRSYVTLSSLRRHANVHSWRRTYPCHYCNKVFALAEYRTRHEIWHTGERRYQCIFCLETFMTYYILKNHQKSFHAIDHRLSISKKTANGGLKPSVYPYKLYRLLPMKCKRAPYKSYRNSSYENARENSQMNESAPGTYVVQNPHSSELPTLNFQDTVNTLTNSPAIPLETSACQDIPTSANVQNAEGTKWGEEALKMDLDNNFYSTEVSVSSTENAVSSDLRAGDVPVLSLSNSSENAASVISYSGSAPSVIVHSSQFSSVIMHSNAIAAMTSSNHRAFSDPAVSQSLKDDSKPEPDKVGRFASRPKSIKEKKKTTSHTRGEIPEESNYVADPGGSLSKTTNIAEETSKIETYIAKPALPGTSTNSNVAPLCQITVKIGNEAIVKRHILGSKLFYKRGRRPKYQMQEEPLPQGNDPEPSGDSPLGLCQSECMEMSEVFDDASDQDSTDKPWRPYYNYKPKKKSRQLKKMRKVNWRKEHGNRSPSHKCKYPAELDCAVGKAPQDKPFEEEETKEMPKLQCELCDGDKAVGAGNQGRPHRHLTSRPYACELCAKQFQSPSTLKMHMRCHTGEKPYQCKTCGRCFSVQGNLQKHERIHLGLKEFVCQYCNKAFTLNETLKIHERIHTGEKRYHCQFCFQRFLYLSTKRNHEQRHIREHNGKGYACFQCPKICKTAAALGMHQKKHLFKSPSQQEKIGDVCHENSNPLENQHFIGSEDNDQKDNIQTGVENVVL

SEQ ID NO: 15877 - protein, 712 aa, Homo sapiens
MGMRIKLQSTNHPNNLLKELNKCRLSETMCDVTIVVGSRSFPAHKAVLACAAGYFQNLFLNTGLDAARTYVVDFITPANFEKVLSFVYTSELFTDLINVGVIYEVAERLGMEDLLQACHSTFPDLESTARAKPLTSTSESHSGTLSCPSAEPAHPLGELRGGGDYLGADRNYVLPSDAGGSYKEEEKNVASDANHSLHLPQPPPPPPKTEDHDTPAPFTSIPSMMTQPLLGTVSTGIQTSTSSCQPYKVQSNGDFSKNSFLTPDNAVDITTGTNSCLSNSEHSKDPGFGQMDELQLEDLGDDDLQFEDPAEDIGTTEEVIELSDDSEDELAFGENDNRENKAMPCQVCKKVLEPNIQLIRQHARDHVDLLTGNCKVCETHFQDRNSRVTHVLSHIGIFLFSCDMCETKFFTQWQLTLHRRDGIFENNIIVHPNDPLPGKLGLFSGAASPELKCAACGKVLAKDFHVVRGHILDHLNLKGQACSVCDQRHLNLCSLMWHTLSHLGISVFSCSVCANSFVDWHLLEKHMAVHQSLEDALFHCRLCSQSFKSEAAYRYHVSQHKCNSGLDARPGFGLQHPALQKRKLPAEEFLGEELALQGQPGNSKYSCKVCGKRFAHTSEFNYHRRIHTGEKPYQCKVCHKFFRGRSTIKCHLKTHSGALMYRCTVCGHYSSTLNLMSKHVGVHKGSLPPDFTIEQTFMYIIHSKEADKNPDS

SEQ ID NO: 15878 - protein, 1013 aa, Homo sapiens
MPPPAEVTDPSHAPAVLRQLNEQRLRGLFCDVTLIAGDTKFPAHRSVLAASSPFFREALLTSAPLPLPPATGGAAPNPATTTAASSSSSSSSSSSSSSSSASSSSSSSSSSPPPASPPASSPPRVLELPGVPAAAFSDVLNFIYSARLALPGGGGDGAAVAEIGALGRRLGISRLQGLGEGGDAWVPPTPAPMATSQPEEDSFGPGPRPAGEWEGDRAEAQAPDLQCSLPRRPLPCPQCGKSFIHPKRLQTHEAQCRRGASTRGSTGLGAGGAGPGGPAGVDASALPPPVGFRGGPEHVVKVVGGHVLYVCAACERSYVTLSSLKRHSNVHSWRRKYPCRYCEKVFALAEYRTKHEVWHTGERRYQCIFCWETFVTYYNLKTHQRAFHGISPGLLASEKTPNGGYKPKLNTLKLYRLLPMRAAKRPYKTYSQGAPEAPLSPTLNTPAPVAMPASPPPGPPPAPEPGPPPSVITFAHPAPSVIVHGGSSSGGGGSGTASTGGSQAASVITYTAPPRPPKKREYPPPPPEPAATPTSPATAVSPATAAGPAMATTTEEAKGRNPRAGRTLTYTAKPVGGIGGGGGPPTGAGRGPSQLQAPPPLCQITVRIGEEAIVKRRISETDLRPGELSGEEMEESEEDEEEEDEEEEEEDEEESKAGGEDQLWRPYYSYKPKRKAGAAGGASVGGSGLPRGRRPPRWRQKLERRSWEETPAAESPAGRARTERRHRCGDCAQTFTTLRKLRKHQEAHGGGSHSSRAGRRPSTRFTCPHCAKVCKTAAALSRHGQRHAAERPGGTPTPVIAYSKGSAGTRPGDVKEEAPQEMQVSSSSGEAGGGSTAAEEASETASLQDPIISGGEEPPVVASGGSYVYPPVQEFPLALIGGGREPGGGRGKSGSEGPVGAGEGDRMEGIGAAKVTFYPEPYPLVYGPQLLAAYPYNFSNLAALPVALNMVLPDEKGAGALPFLPGVFGYAVNPQAAPPAPPTPPPPTLPPPIPPKGEGERAGVERTQKGDVG

SEQ ID NO: 15879 - protein, 1239 aa, Homo sapiens
MELPNYSRQLLQQLYTLCKEQQFCDCTISIGTIYFRAHKLVLAAASLLFKTLLDNTDTISIDASVVSPEEFALLLEMMYTGKLPVGKHNFSKIISLADSLQMFDVAVSCKNLLTSLVNCSVQGQVVRDVSAPSSETFRKEPEKPQVEILSSEGAGEPHSSPELAATPGGPVKAETEEAAHSVSQEMSVNSPTAQESQRNAETPAETPTTAEACSPSPAVQTFSEAKKTSTEPGCERKHYQLNFLLENEGVFSDALMVTQDVLKKLEMCSEIKGPQKEMIVKCFEGEGGHSAFQRILGKVREESLDVQTVVSLLRLYQYSNPAVKTALLDRKPEDVDTVQPKGSTEEGKTLSVLLLEHKEDLIQCVTQLRPIMESLETAKEEFLTGTEKRVILNCCEGRTPKETIENLLHRMTEEKTLTAEGLVKLLQAVKTTFPNLGLLLEKLQKSATLPSTTVQPSPDDYGTELLRRYHENLSEIFTDNQILLKMISHMTSLAPGEREVMEKLVKRDSGSGGFNSLISAVLEKQTLSATAIWQLLLVVQETKTCPLDLLMEEIRREPGADAFFRAVTTPEHATLETILRHNQLILEAIQQKIEYKLFTSEEEHLAETVKEILSIPSETASPEASLRAVLSRAMEKSVPAIEICHLLCSVHKSFPGLQPVMQELAYIGVLTKEDGEKETWKVSNKFHLEANNKEDEKAAKEDSQPGEQNDQGETGSLPGQQEKEASASPDPAKKSFICKACDKSFHFYCRLKVHMKRCRVAKSKQVQCKECSETKDSKKELDKHQLEAHGAGGEPDAPKKKKKRLPVTCDLCGREFAHASGMQYHKLTEHFDEKPFSCEECGAKFAANSTLKNHLRLHTGDRPFMCKHCLMTFTQASALAYHTKKKHSEGKMYACQYCDAVFAQSIELSRHVRTHTGDKPYVCRDCGKGFRQANGLSIHLHTFHNIEDPYDCKKCRMSFPTLQDHRKHIHEVHSKEYHPCPTCGKIFSAPSMLERHVVTHVGGKPFSCGICNKAYQQLSGLWYHNRTHHPDVFAAQNHRSSKFSSLQCSSCDKTFPNTIEHKKHIKAEHADMKFHECDQCKELFPTPALLQVHVKCQHSGSQPFRCLYCAATFRFPGALQHHVTTEHFKQSETTFPCELCGELFTSQAQLDSHLESEHPKVMSTETQAAASQMAQVIQTPEPVAPTEQVITLEETQLAGSQVFVTLPDSQASQASSELVAVTVEDLLDGTVTLICGEAK

SEQ ID NO: 15880 - protein, 909 aa, Homo sapiens
MKKRRKVTSNLEKIHLGYHKDSSEGNVAVECDQVTYTHSAGRPTPEALHCYQELPPSPDQRKLLSSLQYNKNLLKYLNDDRQKQPSFCDLLIIVEGKEFSAHKVVVAVGSSYFHACLSKNPSTDVVTLDHVTHSVFQHLLEFLYTSEFFVYKYEIPLVLEAAKFLDIIDAVKLLNNENVAPFHSELTEKSSPEETLNELTGRLSNNHQCKFCSRHFCYKKSLENHLAKTHRSLLLGKKHGLKMLERSFSARRSKRNRKCPVKFDDTSDDEQESGDGSDNLNQENFDKEKSDRNDSEDPGSEYNAEEDELEEEMSDEYSDIEEQSEKDHNDAEEEPEAGDSVGNVHEGLTPVVIQNSNKKILQCPKCDKTFDRIGKYESHTRVHTGEKPFECDICHQRYSTKSNLTVHRKKHSNETEFHKKEHKCPYCNKLHASKKTLAKHVKRFHPENAQEFISIKKTKSESWKCDICKKSFTRRPHLEEHMILHSQDKPFKCTYCEEHFKSRFARLKHQEKFHLGPFPCDICGRQFNDTGNLKRHIECTHGGKRKWTCFICGKSVRERTTLKEHLRIHSGEKPHLCSICGQSFRHGSSYRLHLRVHHDDKRYECDECGKTFIRHDHLTKHKKIHSGEKAHQCEECGKCFGRRDHLTVHYKSVHLGEKVWQKYKATFHQCDVCKKIFKGKSSLEMHFRTHSGEKPYKCQICNQSFRIKKTLTKHLVIHSDARPFNCQHCNATFKRKDKLKYHIDHVHEIKSPDDPLSTSEEKLVSLPVEYSSDDKIFQTETKQYMDQPKVYQSEAKTMLQNVSAEVCVPVTLVPVQMPDTPSDLVRHTTTLPPSSHEILSPQPQSTDYPRAADLAFLEKYTLTPQPANIVHPVRPEQMLDPREQSYLGTLLGLDSTTGVQNISTNEHHS

SEQ ID NO: 15881 - protein, 422 aa, Homo sapiens
MEFPEHGGRLLGRLRQQRELGFLCDCTVLVGDARFPAHRAVLAACSVYFHLFYRDRPAGSRDTVRLNGDIVTAPAFGRLLDFMYEGRLDLRSLPVEDVLAAASYLHMYDIVKVCKGRLQEKDRSLDPGNPAPGAEPAQPPCPWPVWTADLCPAARKAKLPPFGVKAALPPRASGPPPCQVPEESDQALDLSLKSGPRQERVHPPCVLQTPLCSQRQPGAQPLVKDERDSLSEQEESSSSRSPHSPPKPPPVPAAKGLVVGLQPLPLSGEGSRELELGAGRLASEDELGPGGPLCICPLCSKLFPSSHVLQLHLSAHFRERDSTRARLSPDGVAPTCPLCGKTFSCTYTLKRHERTHSGEKPYTCVQCGKSFQYSHNLSRHTVVHTREKPHACRWCERRFTQSGDLYRHVRKFHCGLVKSLLV

SEQ ID NO: 15882 - protein, 467 aa, Homo sapiens
MEPGTNSFRVEFPDFSSTILQKLNQQRQQGQLCDVSIVVQGHIFRAHKAVLAASSPYFCDQVLLKNSRRIVLPDVMNPRVFENILLSSYTGRLVMPAPEIVSYLTAASFLQMWHVVDKCTEVLEGNPTVLCQKLNHGSDHQSPSSSSYNGLVESFELGSGGHTDFPKAQELRDGENEEESTKDELSSQLTEHEYLPSNSSTEHDRLSTEMASQDGEEGASDSAEFHYTRPMYSKPSIMAHKRWIHVKPERLEQACEGMDVHATYDEHQVTESINTVQTEHTVQPSGVEEDFHIGEKKVEAEFDEQADESNYDEQVDFYGSSMEEFSGERSDGNLIGHRQEAALAAGYSENIEMVTGIKEEASHLGFSATDKLYPCQCGKSFTHKSQRDRHMSMHLGLRPYGCGVCGKKFKMKHHLVGHMKIHTGIKPYECNICAKRFMWRDSFHRHVTSCTKSYEAAKAEQNTTEAN

SEQ ID NO: 15883 - protein, 570 aa, Homo sapiens
MGVKTFTHSSSSHSQEMLGKLNMLRNDGHFCDITIRVQDKIFRAHKVVLAACSDFFRTKLVGQAEDENKNVLDLHHVTVTGFIPLLEYAYTATLSINTENIIDVLAAASYMQMFSVASTCSEFMKSSILWNTPNSQPEKGLDAGQENNSNCNFTSRDGSISPVSSECSVVERTIPVCRESRRKRKSYIVMSPESPVKCGTQTSSPQVLNSSASYSENRNQPVDSSLAFPWTFPFGIDRRIQPEKVKQAENTRTLELPGPSETGRRMADYVTCESTKTTLPLGTEEDVRVKVERLSDEEVHEEVSQPVSASQSSLSDQQTVPGSEQVQEDLLISPQSSSIGSVDEGVSEGLPTLQSTSSTNAPPDDDDRLENVQYPYQLYIAPSTSSTERPSPNGPDRPFQCPTCGVRFTRIQNLKQHMLIHSGIKPFQCDRCGKKFTRAYSLKMHRLKHEGKRCFRCQICSATFTSFGEYKHHMRVSRHIIRKPRIYECKTCGAMLTNSGNLIVHLRSLNHEASELANYFQSSDFLVPDYLNQEQEETLVQYDLGEHGFESNSSVQMPVISQYHSKGKEP

SEQ ID NO: 15884 - protein, 511 aa, Homo sapiens
MAAAEAVHHIHLQNFSRSLLETLNGQRLGGHFCDVTVRIREASLRAHRCVLAAGSPFFQDKLLLGHSEIRVPPVVPAQTVRQLVEFLYSGSLVVAQGEALQVLTAASVLRIQTVIDECTQIIARARAPGTSAPTPLPTPVPPPLAPAQLRHRLRHLLAARPPGHPGAAHSRKQRQPARLQLPAPPTPAKAEGPDADPSLSAAPDDRGDEDDEESDDETDGEDGEGGGPGEGQAPPSFPDCAAGFLTAAADSACEEPPAPTGLADYSGAGRDFLRGAGSAEDVFPDSYVSTWHDEDGAVPEGCPTETPVQPDCILSGSRPPGVKTPGPPVALFPFHLGAPGPPAPPPSAPSGPAPAPPPAFYPTLQPEAAPSTQLGEVPAPSAAPTTAPSGTPARTPGAEPPTYECSHCRKTFSSRKNYTKHMFIHSGEKPHQCAVCWRSFSLRDYLLKHMVTHTGVRAFQCAVCAKRFTQKSSLNVHMRTHRPERAPCPACGKVFSHRALLERHLAAHPAP

SEQ ID NO: 15885 - protein, 589 aa, Homo sapiens
MNNRKEDMEITSHYRHLLRELNEQRQHGVLCDVCVVVEGKVFKAHKNVLLGSSRYFKTLYCQVQKTSEQATVTHLDIVTAQGFKAIIDFMYSAHLALTSRNVIEVMSAASFLQMTDIVQACHDFIKAALDISIKSDASDELAEFEIGASSSSSTEALISAVMAGRSISPWLARRTSPANSSGDSAIASCHDGGSSYGKEDQEPKADGPDDVSSQPLWPGDVGYGPLRIKEEQVSPSQYGGSELPSAKDGAVQNSFSEQSAGDAWQPTGRRKNRKNKETVRHITQQVEDDSRASSPVPSFLPTSGWPFSSRDSNADLSVTEASSSDSRGERAELYAQVEEGLLGGEASYLGPPLTPEKDDALHQATAVANLRAALMSKNSLLSLKADVLGDDGSLLFEYLPRGAHSLSLNEFTVIRKKFKCPYCSFSAMHQCILKRHMRSHTGERPYPCEICGKKFTRREHMKRHTLVHSKDKKYVCKVCSRVFMSAASVGIRHGSRRHGVCTDCAGRGMAGPLDHGGGGGEGSPEALFPGDGPYLEDPEDPRGEAEELGEDDEGLAPEDALLADDKDEEDSPRPRSPPGGPDKDFAWLS

SEQ ID NO: 15886 - protein, 747 aa, Homo sapiens
MGRLNEQRLFQPDLCDVDLVLVPQRSVFPAHKGVLAAYSQFFHSLFTQNKQLQRVELSLEALAPGGLQQILNFIYTSKLLVNAANVHEVLSAASLLQMADIAASCQELLDARSLGPPGPGTVALAQPAASCTPAAPPYYCDIKQEADTPGLPKIYAREGPDPYSVRVEDGAGTAGGTVPATIGPAQPFFKEEKEGGVEEAGGPPASLCKLEGGEELEEELGGSGTYSRREQSQIIVEVNLNNQTLHVSTGPEGKPGAGPSPATVVLGREDGLQRHSDEEEEDDEEEEEEEEEEEGGGSGREEEEEEEGGSQGEEEEEEEDGHSEQEEEEEEEEEEGPSEQDQESSEEEEGEEGEAGGKQGPRGSRSSRADPPPHSHMATRSRENARRRGTPEPEEAGRRGGKRPKPPPGVASASARGPPATDGLGAKVKLEEKQHHPCQKCPRVFNNRWYLEKHMNVTHSRMQICDQCGKRFLLESELLLHRQTDCERNIQCVTCGKAFKKLWSLHEHNKIVHGYAEKKFSCEICEKKFYTMAHVRKHMVAHTKDMPFTCETCGKSFKRSMSLKVHSLQHSGEKPFRCENCNERFQYKYQLRSHMSIHIGHKQFMCQWCGKDFNMKQYFDEHMKTHTGEKPYICEICGKSFTSRPNMKRHRRTHTGEKPYPCDVCGQRFRFSNMLKAHKEKCFRVSHTLAGDGVPAAPGLPPTQPQAHALPLLPGLPQTLPPPPHLPPPPPLFPTTASPGGRMNANN

SEQ ID NO: 15887 - protein, 688 aa, Homo sapiens
MDGSFVQHSVRVLQELNKQREKGQYCDATLDVGGLVFKAHWSVLACCSHFFQSLYGDGSGGSVVLPAGFAEIFGLLLDFFYTGHLALTSGNRDQVLLAARELRVPEAVELCQSFKPKTSVGQAAGGQSGLGPPASQNVNSHVKEPAGLEEEEVSRTLGLVPRDQEPRGSHSPQRPQLHSPAQSEGPSSLCGKLKQALKPCPLEDKKPEDCKVPPRPLEAEGAQLQGGSNEWEVVVQVEDDGDGDYMSEPEAVLTRRKSNVIRKPCAAEPALSAGSLAAEPAENRKGTAVPVECPTCHKKFLSKYYLKVHNRKHTGEKPFECPKCGKCYFRKENLLEHEARNCMNRSEQVFTCSVCQETFRRRMELRVHMVSHTGEMPYKCSSCSQQFMQKKDLQSHMIKLHGAPKPHACPTCAKCFLSRTELQLHEAFKHRGEKLFVCEECGHRASSRNGLQMHIKAKHRNERPHVCEFCSHAFTQKANLNMHLRTHTGEKPFQCHLCGKTFRTQASLDKHNRTHTGERPFSCEFCEQRFTEKGPLLRHVASRHQEGRPHFCQICGKTFKAVEQLRVHVRRHKGVRKFECTECGYKFTRQAHLRRHMEIHDRVENYNPRQRKLRNLIIEDEKMVVVALQPPAELEVGSAEVIVESLAQGGLASQLPGQRLCAEESFTGPGVLEPSLIITAAVPEDCDT

SEQ ID NO: 15888 - protein, 765 aa, Homo sapiens
MDPVATHSCHLLQQLHEQRIQGLLCDCMLVVKGVCFKAHKNVLAAFSQYFRSLFQNSSSQKNDVFHLDVKNVSGIGQILDFMYTSHLDLNQDNIQVMLDTAQCLQVQNVLSLCHTFLKSATVVQPPGMPCNSTLSLQSTLTPDATCVISENYPPHLLQECSADAQQNKTLDESHPHASPSVNRHHSAGEISKQAPDTSDGSCTELPFKQPNYYYKLRNFYSKQYHKHAAGPSQERVVEQPFAFSTSTDLTTVESQPCAVSHSECILESPEHLPSNFLAQPVNDSAPHPESDATCQQPVKQMRLKKAIHLKKLNFLKSQKYAEQVSEPKSDDGLTKRLESASKNTLEKASSQSAEEKESEEVVSCENFNCISETERPEDPAALEDQSQTLQSQRQYACELCGKPFKHPSNLELHKRSHTGEKPFECNICGKHFSQAGNLQTHLRRHSGEKPYICEICGKRFAASGDVQRHIIIHSGEKPHLCDICGRGFSNFSNLKEHKKTHTADKVFTCDECGKSFNMQRKLVKHRIRHTGERPYSCSACGKCFGGSGDLRRHVRTHTGEKPYTCEICNKCFTRSAVLRRHKKMHCKAGDESPDVLEELSQAIETSDLEKSQSSDSFSQDTSVTLMPVSVKLPVHPVENSVAEFDSHSGGSYCKLRSMIQPHGVSDQEKLSLDPGKLAKPQMQQTQPQAYAYSDVDTPAGGEPLQADGMAMIRSSLAALDNHGGDPLGSRASSTTYRNSEGQFFSSMTLWGLAMKTLQNENELDQ

SEQ ID NO: 15889 - protein, 677 aa, Homo sapiens
MDFPGHFEQIFQQLNYQRLHGQLCDCVIVVGNRHFKAHRSVLAACSTHFRALFSVAEGDQTMNMIQLDSEVVTAEAFAALIDMMYTSTLMLGESNVMDVLLAASHLHLNSVVKACKHYLTTRTLPMSPPSERVQEQSARMQRSFMLQQLGLSIVSSALNSSQNGEEQPAPMSSSMRSNLDQRTPFPMRRLHKRKQSAEERARQRLRPSIDESAISDVTPENGPSGVHSREEFFSPDSLKIVDNPKADGMTDNQEDSAIMFDQSFGTQEDAQVPSQSDNSAGNMAQLSMASRATQVETSFDQEAAPEKSSFQCENPEVGLGEKEHMRVVVKSEPLSSPEPQDEVSDVTSQAEGSESVEVEGVVVSAEKIDLSPESSDRSFSDPQSSTDRVGDIHILEVTNNLEHKSTFSISNFLNKSRGNNFTANQNNDDNIPNTTSDCRLESEAPYLLSPEAGPAGGPSSAPGSHVENPFSEPADSHFVRPMQEVMGLPCVQTSGYQGGEQFGMDFSRSGLGLHSSFSRVMIGSPRGGASNFPYYRRIAPKMPVVTSVRSSQIPENSTSSQLMMNGATSSFENGHPSQPGPPQLTRASADVLSKCKKALSEHNVLVVEGARKYACKICCKTFLTLTDCKKHIRVHTGEKPYACLKCGKRFSQSSHLYKHSKTTCLRWQSSNLPSTLL

SEQ ID NO: 15890 - protein, 424 aa, Homo sapiens
MAAESDVLHFQFEQQGDVVLQKMNLLRQQNLFCDVSIYINDTEFQGHKVILAACSTFMRDQFLLTQSKHVRITILQSAEVGRKLLLSCYTGALEVKRKELLKYLTAASYLQMVHIVEKCTEALSKYLEIDLSMKNNNQHTDLCQSSDPDVKNEDENSDKDCEIIEISEDSPVNIDFHVKEEESNALQSTVESLTSERKEMKSPELSTVDIGFKDNEICILHVESISTAGVENGQFSQPCTSSKASMYFSETQHSLINSTVESRVAEVPGNQDQGLFCENTEGSYGTVSEIQNLEEGYSLRHQCPRCPRGFLHVENYLRHLKMHKLFLCLQCGKTFTQKKNLNRHIRGHMGIRPFQCTVCLKTFTAKSTLQDHLNIHSGDRPYKCHCCDMDFKHKSALKKHLTSVHGRSSGEKLSRPDLKRQSLL

SEQ ID NO: 15891 - protein, 584 aa, Homo sapiens
MAGGVDGPIGIPFPDHSSDILSGLNEQRTQGLLCDVVILVEGREFPTHRSVLAACSQYFKKLFTSGAVVDQQNVYEIDFVSAEALTALMDFAYTATLTVSTANVGDILSAARLLEIPAVSHVCADLLDRQILAADAGADAGQLDLVDQIDQRNLLRAKEYLEFFQSNPMNSLPPAAAAAAASFPWSAFGASDDDLDATKEAVAAAVAAVAAGDCNGLDFYGPGPPAERPPTGDGDEGDSNPGLWPERDEDAPTGGLFPPPVAPPAATQNGHYGRGGEEEAASLSEAAPEPGDSPGFLSGAAEGEDGDGPDVDGLAASTLLQQMMSSVGRAGAAAGDSDEESRADDKGVMDYYLKYFSGAHDGDVYPAWSQKVEKKIRAKAFQKCPICEKVIQGAGKLPRHIRTHTGEKPYECNICKVRFTRQDKLKVHMRKHTGEKPYLCQQCGAAFAHNYDLKNHMRVHTGLRPYQCDSCCKTFVRSDHLHRHLKKDGCNGVPSRRGRKPRVRGGAPDPSPGATATPGAPAQPSSPDARRNGQEKHFKDEDEDEDVASPDGLGRLNVAGAGGGGDSGGGPGAATDGNFTAGLA

SEQ ID NO: 15892 - protein, 539 aa, Homo sapiens; identical to SEQ ID NO: 15784

SEQ ID NO: 15893 - protein, 619 aa, Homo sapiens
MANDIDELIGIPFPNHSSEVLCSLNEQRHDGLLCDVLLVVQEQEYRTHRSVLAACSKYFKKLFTAGTLASQPYVYEIDFVQPEALAAILEFAYTSTLTITAGNVKHILNAARMLEIQCIVNVCLEIMEPGGDGGEEDDKEDDDDDEDDDDEEDEEEEEEEEEDDDDDTEDFADQENLPDPQDISCHQSPSKTDHLTEKAYSDTPRDFPDSFQAGSPGHLGVIRDFSIESLLRENLYPKANIPDRRPSLSPFAPDFFPHLWPGDFGAFAQLPEQPMDSGPLDLVIKNRKIKEEEKEELPPPPPPPFPNDFFKDMFPDLPGGPLGPIKAENDYGAYLNFLSATHLGGLFPPWPLVEERKLKPKASQQCPICHKVIMGAGKLPRHMRTHTGEKPYMCTICEVRFTRQDKLKIHMRKHTGERPYLCIHCNAKFVHNYDLKNHMRIHTGVRPYQCEFCYKSFTRSDHLHRHIKRQSCRMARPRRGRKPAAWRAASLLFGPGGPAPDKAAFVMPPALGEVGGHLGGAAVCLPGPSPAKHFLAAPKGALSLQELERQFEETQMKLFGRAQLEAERNAGGLLAFALAENVAAARPYFPLPDPWAAGLAGLPGLAGLNHVASMSEANN

SEQ ID NO: 15894 - protein, 441 aa, Homo sapiens
MEISSHQSHLLQQLNEQRRQDVFCDCSILVEGKVFKAHRNVLFASSGYFKMLLSQNSKETSQPTTATFQAFSPDTFTVILDFVYSGKLSLTGQNVIEVMSAASFLQMTDVISVCKTFIKSSLDISEKEKDRYFSLSDKDANSNGVERSSFYSGGWQEGSSSPRSHLSPEQGTGIISGKSWNKYNYHPASQKNTQQPLAKHEPRKESIKKTKHLRLSQPSEVTHYKSSKREVRTSDSSSHVSQSEEQAQIDAEMDSTPVGYQYGQGSDVTSKSFPDDLPRMRFKCPYCTHVVKRKADLKRHLRCHTGERPYPCQACGKRFSRLDHLSSHFRTIHQACKLICRKCKRHVTDLTGQVVQEGTRRYRLCNECLAEFGIDSLPIDLEAEQHLMSPSDGDKDSRWHLSEDENRSYVEIVEDGSGDLVIQQVDDSEEEEEKEIKPNIR

SEQ ID NO: 15895 - protein, 473 aa, Homo sapiens
METPTPLPPVPASPTCNPAPRTIQIEFPQHSSSLLESLNRHRLEGKFCDVSLLVQGRELRAHKAVLAAASPYFHDKLLLGDAPRLTLPSVIEADAFEGLLQLIYSGRLRLPLDALPAHLLVASGLQMWQVVDQCSEILRELETSGGGISARGGNSYHALLSTTSSTGGWCIRSSPFQTPVQSSASTESPASTESPVGGEGSELGEVLQIQVEEEEEEEEDDDDEDQGSATLSQTPQPQRVSGVFPRPHGPHPLPMTATPRKLPEGESAPLELPAPPALPPKIFYIKQEPFEPKEEISGSGTQPGGAKEETKVFSGGDTEGNGELGFLLPSGPGPTSGGGGPSWKPVDLHGNEILSGGGGPGGAGQAVHGPVKLGGTPPADGKRFGCLCGKRFAVKPKRDRHIMLTFSLRPFGCGICNKRFKLKHHLTEHMKTHAGALHACPHCGRRFRVHACFLRHRDLCKGQGWATAHWTYK

SEQ ID NO: 15896 - protein, 434 aa, Homo sapiens
MPDRDSYANGTGSSGGGPGGGGSEEASGAGVGSGGASSDAICRDFLRNVCKRGKRCRYRHPDMSEVSNLGVSKNEFIFCHDFQNKECSRPNCRFIHGSKEDEDGYKKTGELPPRLRQKVAAGLGLSPADLPNGKEEVPICRDFLKGDCQRGAKCKFRHLQRDFEFDARGGGGTGGGSTGSVLPGRRHDLYDIYDLPDRGFEDHEPGPKRRRGGCCPPDGPHFESYEYSLAPPRGVECRLLEEENAMLRKRVEELKKQVSNLLATNEVLLEQNAQFRNQAKVITLSSTAPATEQTLAPTVGTVATFNHGIAQTHTTLSSQALQPRPVSQQELVAPAGAPAAPPTNAAPPAAPPPPPPHLTPEITPLSAALAQTIAQGMAPPPVSMAPVAVSVAPVAPVAVSMAQPLAGITMSHTTTPMVTYPIASQSMRITAMPH

SEQ ID NO: 15897 - protein, 810 aa, Homo sapiens
MPNQGEDCYFFFYSTCTKGDSCPFRHCEAAIGNETVCTLWQEGRCFRQVCRFRHMEIDKKRSEIPCYWENQPTGCQKLNCAFHHNRGRYVDGLFLPPSKTVLPTVPESPEEEVKASQLSVQQNKLSVQSNPSPQLRSVMKVESSENVPSPTHPPVVINAADDDEDDDDQFSEEGDETKTPTLQPTPEVHNGLRVTSVRKPAVNIKQGECLNFGIKTLEEIKSKKMKEKSKKQGEGSSGVSSLLLHPEPVPGPEKENVRTVVRTVTLSTKQGEEPLVRLSLTERLGKRKFSAGGDSDPPLKRSLAQRLGKKVEAPETNIDKTPKKAQVSKSLKERLGMSADPDNEDATDKVNKVGEIHVKTLEEILLERASQKRGELQTKLKTEGPSKTDDSTSGARSSSTIRIKTFSEVLAEKKHRQQEAERQKSKKDTTCIKLKIDSEIKKTVVLPPIVASRGQSEEPAGKTKSMQEVHIKTLEEIKLEKALRVQQSSESSTSSPSQHEATPGARRLLRITKRTGMKEEKNLQEGNEVDSQSSIRTEAKEASGETTGVDITKIQVKRCETMREKHMQKQQEREKSVLTPLRGDVASCNTQVAEKPVLTAVPGITRHLTKRLPTKSSQKVEVETSGIGDSLLNVKCAAQTLEKRGKAKPKVNVKPSVVKVVSSPKLAPKRKAVEMHAAVIAAVKPLSSSSVLQEPPAKKAAVAVVPLVSEDKSVTVPEAENPRDSLVLPPTQSSSDSSPPEVSGPSSSQMSMKTRRLSSASTGKPPLSVEDDFEKLIWEISGGKLEAEIDLDPGKDEDDLLLELSEMIDS

SEQ ID NO: 15898 - protein, 599 aa, Homo sapiens
MSGPCGEKPVLEASPTMSLWEFEDSHSRQGTPRPGQELAAEEASALELQMKVDFFRKLGYSSTEIHSVLQKLGVQADTNTVLGELVKHGTATERERQTSPDPCPQLPLVPRGGGTPKAPNLEPPLPEEEKEGSDLRPVVIDGSNVAMSHGNKEVFSCRGILLAVNWFLERGHTDITVFVPSWRKEQPRPDVPITDQHILRELEKKKILVFTPSRRVGGKRVVCYDDRFIVKLAYESDGIVVSNDTYRDLQGERQEWKRFIEERLLMYSFVNDKFMPPDDPLGRHGPSLDNFLRKKPLTLEHRKQPCPYGRKCTYGIKCRFFHPERPSCPQRSVADELRANALLSPPRAPSKDKNGRRPSPSSQSSSLLTESEQCSLDGKKLGAQASPGSRQEGLTQTYAPSGRSLAPSGGSGSSFGPTDWLPQTLDSLPYVSQDCLDSGIGSLESQMSELWGVRGGGPGEPGPPRAPYTGYSPYGSELPATAAFSAFGRAMGAGHFSVPADYPPAPPAFPPREYWSEPYPLPPPTSVLQEPPVQSPGAGRSPWGRAGSLAKEQASVYTKLCGVFPPHLVEAVMGRFPQLLDPQQLAAEILSYKSQHPSE

SEQ ID NO: 15899 - protein, 836 aa, Homo sapiens
MTATAEVETPKMEKSASKEEKQQPKQDSTEQGNADSEEWMSSESDPEQISLKSSDNSKSCQPRDGQLKKKEMHSKPHRQLCRSPCLDRPSFSQSSILQDGKLDLEKEYQAKMEFALKLGYAEEQIQSVLNKLGPESLINDVLAELVRLGNKGDSEGQINLSLLVPRGPSSREIASPELSLEDEIDNSDNLRPVVIDGSNVAMSHGNKEEFSCRGIQLAVDWFLDKGHKDITVFVPAWRKEQSRPDAPITDQDILRKLEKEKILVFTPSRRVQGRRVVCYDDRFIVKLAFDSDGIIVSNDNYRDLQVEKPEWKKFIEERLLMYSFVNDKFMPPDDPLGRHGPSLENFLRKRPIVPEHKKQPCPYGKKCTYGHKCKYYHPERANQPQRSVADELRISAKLSTVKTMSEGTLAKCGTGMSSAKGEITSEVKRVAPKRQSDPSIRSVAMEPEEWLSIARKPEASSVPSLVTALSVPTIPPPKSHAVGALNTRSASSPVPGSSHFPHQKASLEHMASMQYPPILVTNSHGTPISYAEQYPKFESMGDHGYYSMLGDFSKLNINSMHNREYYMAEVDRGVYARNPNLCSDSRVSHTRNDNYSSYNNVYLAVADTHPEGNLKLHRSASQNRLQPFPHGYHEALTRVQSYGPEDSKQGPHKQSVPHLALHAQHPSTGTRSSCPADYPMPPNIHPGATPQPGRALVMTRMDSISDSRLYESNPVRQRRPPLCREQHASWDPLPCTTDSYGYHSYPLSNSLMQPCYEPVMVRSVPEKMEQLWRNPWVGMCNDSREHMIPEHQYQTYKNLCNIFPSNIVLAVMEKNPHTADAQQLAALIVAKLRAAR

SEQ ID NO: 15900 - protein, 1668 aa, Homo sapiens
MSKIRRKVTVENTKTISDSTSRRPSVFERLGPSTGSTAETQCRNWLKTGNCLYGNTCRFVHGPSPRGKGYSSNYRRSPERPTGDLRERMKNKRQDVDTEPQKRNTEESSSPVRKESSRGRHREKEDIKITKERTPESEEENVEWETNRDDSDNGDINYDYVHELSLEMKRQKIQRELMKLEQENMEKREEIIIKKEVSPEVVRSKLSPSPSLRKSSKSPKRKSSPKSSSASKKDRKTSAVSSPLLDQQRNSKTNQSKKKGPRTPSPPPPIPEDIALGKKYKEKYKVKDRIEEKTRDGKDRGRDFERQREKRDKPRSTSPAGQHHSPISSRHHSSSSQSGSSIQRHSPSPRRKRTPSPSYQRTLTPPLRRSASPYPSHSLSSPQRKQSPPRHRSPMREKGRHDHERTSQSHDRRHERREDTRGKRDREKDSREEREYEQDQSSSRDHRDDREPRDGRDRRDARDTRDRRELRDSRDMRDSREMRDYSRDTKESRDPRDSRSTRDAHDYRDREGRDTHRKEDTYPEESRSYGRNHLREESSRTEIRNESRNESRSEIRNDRMGRSRGRVPELPEKGSRGSRGSQIDSHSSNSNYHDSWETRSSYPERDRYPERDNRDQARDSSFERRHGERDRRDNRERDQRPSSPIRHQGRNDELERDERREERRVDRVDDRRDERARERDRERERDRERERERERERDREREKERELERERAREREREREKERDRERDRDRDHDRERERERERDREKEREREREERERERERERERERERERERERARERDKERERQRDWEDKDKGRDDRREKREEIREDRNPRDGHDERKSKKRYRNEGSPSPRQSPKRRREHSPDSDAYNSGDDKNEKHRLLSQVVRPQESRSLSPSHLTEDRQGRWKEEDRKPERKESSRRYEEQELKEKVSSVDKQREQTEILESSRMRAQDIIGHHQSEDRETSDRAHDENKKKAKIQKKPIKKKKEDDVGIERGNIETTSEDGQVFSPKKGQKKKSIEKKRKKSKGDSDISDEEAAQQSKKKRGPRTPPITTKEELVEMCNGKNGILEDSQKKEDTAFSDWSDEDVPDRTEVTEAEHTATATTPGSTPSPLSSLLPPPPPVATATATTVPATLAATTAAAATSFSTSAITISTSATPTNTTNNTFANEDSHRKCHRTRVEKVETPHVTIEDAQHRKPMDQKRSSSLGSNRSNRSHTSGRLRSPSNDSAHRSGDDQSGRKRVLHSGSRDREKTKSLEITGERKSRIDQLKRGEPSRSTSSDRQDSRSHSSRRSSPESDRQVHSRSGSFDSRDRLQERDRYEHDRERERERRDTRQREWDRDADKDWPRNRDRDRLRERERERERDKRRDLDRERERLISDSVERDRDRDRDRTFESSQIESVKRCEAKLEGEHERDLESTSRDSLALDKERMDKDLGSVQGFEETNKSERTESLEGDDESKLDDAHSLGSGAGEGYEPISDDELDEILAGDAEKREDQQDEEKMPDPLDVIDVDWSGLMPKHPKEPREPGAALLKFTPGAVMLRVGISKKLAGSELFAKVKETCQRLLEKPKDADNLFEHELGALNMAALLRKEERASLLSNLGPCCKALCFRRDSAIRKQLVKNEKGTIKQAYTSAPMVDNELLRLSLRLFKRKTTCHAPGHEKTEDNKLSQSSIQQELCVS

SEQ ID NO: 15901 - protein, 736 aa, Homo sapiens
MEIGTEISRKIRSAIKGKLQELGAYVDEELPDYIMVMVANKKSQDQMTEDLSLFLGNNTIRFTVWLHGVLDKLRSVTTEPSSLKSSDTNIFDSNVPSNKSNFSRGDERRHEAAVPPLAIPSARPEKRDSRVSTSSQESKTTNVRQTYDDGAATRLMSTVKPLREPAPSEDVIDIKPEPDDLIDEDLNFVQENPLSQKKPTVTLTYGSSRPSIEIYRPPASRNADSGVHLNRLQFQQQQNSIHAAKQLDMQSSWVYETGRLCEPEVLNSLEETYSPFFRNNSEKMSMEDENFRKRKLPVVSSVVKVKKFNHDGEEEEEDDDYGSRTGSISSSVSVPAKPERRPSLPPSKQANKNLILKAISEAQESVTKTTNYSTVPQKQTLPVAPRTRTSQEELLAEVVQGQSRTPRISPPIKEEETKGDSVEKNQGTQQRQLLSRLQIDPVMAETLQMSQDYYDMESMVHADTRSFILKKPKLSEEVVVAPNQESGMKTADSLRVLSGHLMQTRDLVQPDKPASPKFIVTLDGVPSPPGYMSDQEEDMCFEGMKPVNQTAASNKGLRGLLHPQQLHLLSRQLEDPNGSFSNAEMSELSVAQKPEKLLERCKYWPACKNGDECAYHHPISPCKAFPNCKFAEKCLFVHPNCKYDAKCTKPDCPFTHVSRRIPVLSPKPAVAPPAPPSSSQLCRYFPACKKMECPFYHPKHCRFNTQCTRPDCTFYHPTINVPPRHALKWIRPQTSE

SEQ ID NO: 15902 - protein, 426 aa, Homo sapiens
MPPKKQAQAGGSKKAEQKKKEKIIEDKTFGLKNKKGAKQQKFIKAVTHQVKFGQQNPRQVAQSEAEKKLKKDDKKKELQELNELFKPVVAAQKISKGADPKSVVCAFFKQGQCTKGDKCKFSHDLTLERKCEKRSVYIDARDEELEKDTMDNWDEKKLEEVVNKKHGEAEKKKPKTQIVCKHFLEAIENNKYGWFWVCPGGGDICMYRHALPPGFVLKKDKKKEEKEDEISLEDLIERERSALGPNVTKITLESFLAWKKRKRQEKIDKLEQDMERRKADFKAGKALVISGREVFEFRPELVNDDDEEADDTRYTQGTGGDEVDDSVSVNDIDLSLYIPRDVDETGITVASLERFSTYTSDKDENKLSEASGGRAENGERSDLEEDNEREGTENGAIDAVPVDENLFTGEDLDELEEELNTLDLEE

SEQ ID NO: 15903 - protein, 953 aa, Homo sapiens
MDVAESPERDPHSPEDEEQPQGLSDDDILRDSGSDQDLDGAGVRASDLEDEESAARGPSQEEEDNHSDEEDRASEPKSQDQDSEVNELSRGPTSSPCEEEGDEGEEDRTSDLRDEASSVTRELDEHELDYDEEVPEEPAPAVQEDEAEKAGAEDDEEKGEGTPREEGKAGVQSVGEKESLEAAKEKKKEDDDGEIDDGEIDDDDLEEGEVKDPSDRKVRPRPTCRFFMKGNCTWGMNCRFIHPGVNDKGNYSLITKADPFPPNGAPPLGPHPLMPANPWGGPVVDEILPPPPPEPPTESAWERGLRHAKEVLKKATIRKEQEPDFEEKRFTVTIGEDEREFDKENEVFRDWNSRIPRDVRDTVLEPYADPYYDYEIERFWRGGQYENFRVQYTETEPYHNYRERERERERENRQRERERERERDRERERRQRERERERERERDKERQRRKEEWERERAKRDEKDRQHRDRDREKEREKEKGKPKPRSPQPPSRQAEPPKKEAATTGPQVKRADEWKDPWRRSKSPKKKLGVSVSPSRARRRRKTSASSASASNSSRSSSRSSSYSGSGSSRSRSRSSSYSSYSSRSSRHSSFSGSRSRSRSFSSSPSPSPTPSPHRPSIRTKGEPAPPPGKAGEKSVKKPAPPPAPPQATKTTAPVPEPTKPGDPREARRKERPARTPPRRRTLSGSGSGSGSSYSGSSSRSRSLSVSSVSSVSSATSSSSSAHSVDSEDMYADLASPVSSASSRSPAPAQTRKEKGKSKKEDGVKEEKRKRDSSTQPPKSAKPPAGGKSSQQPSTPQQAPPGQPQQGTFVAHKEIKLTLLNKAADKGSRKRYEPSDKDRQSPPPAKRPNTSPDRGSRDRKSGGRLGSPKPERQRGQNSKAPAAPADRKRQLSPQSKSSSKVTSVPGKASDPGAASTKSGKASTLSRREELLKQLKAVEDAIARKRAKIPGKA

SEQ ID NO: 15904 - protein, 948 aa, Homo sapiens
MEEKEILRRQIRLLQGLIDDYKTLHGNAPAPGTPAASGWQPPTYHSGRAFSARYPRPSRRGYSSHHGPSWRKKYSLVNRPPGPSDPPADHAVRPLHGARGGQPPVPQQHVLERQVQLSQGQNVVIKVKPPSKSGSASASGAQRGSLEEFEETPWSDQRPREGEGEPPRGQLQPSRPTRARGTCSVEDPLLVCQKEPGKPRMVKSVGSVGDSPREPRRTVSESVIAVKASFPSSALPPRTGVALGRKLGSHSVASCAPQLLGDRRVDAGHTDQPVPSGSVGGPARPASGPRQAREASLVVTCRTNKFRKNNYKWVAASSKSPRVARRALSPRVAAENVCKASAGMANKVEKPQLIADPEPKPRKPATSSKPGSAPSKYKWKASSPSASSSSSFRWQSEASSKDHASQLSPVLSRSPSGDRPAVGHSGLKPLSGETPLSAYKVKSRTKIIRRRSSTSLPGDKKSGTSPAATAKSHLSLRRRQALRGKSSPVLKKTPNKGLVQVTTHRLCRLPPSRAHLPTKEASSLHAVRTAPTSKVIKTRYRIVKKTPASPLSAPPFPLSLPSWRARRLSLSRSLVLNRLRPVASGGGKAQPGSPWWRSKGYRCIGGVLYKVSANKLSKTSGQPSDAGSRPLLRTGRLDPAGSCSRSLASRAVQRSLAIIRQARQRREKRKEYCMYYNRFGRCNRGERCPYIHDPEKVAVCTRFVRGTCKKTDGTCPFSHHVSKEKMPVCSYFLKGICSNSNCPYSHVYVSRKAEVCSDFLKGYCPLGAKCKKKHTLLCPDFARRGACPRGAQCQLLHRTQKRHSRRAATSPAPGPSDATARSRVSASHGPRKPSASQRPTRQTPSSAALTAAAVAAPPHCPGGSASPSSSKASSSSSSSSSPPASLDHEAPSLQEAALAAACSNRLCKLPSFISLQSSPSPGAQPRVRAPRAPLTKDSGKPLHIKPRL

SEQ ID NO: 15905 - protein, 1303 aa, Homo sapiens
MEAAPGTPPPPPSESPPPPSPPPPSTPSPPPCSPDARPATPHLLHHRLPLPDDREDGELEEGELEDDGAEETQDTSGGPERSRKEKGEKHHSDSDEEKSHRRLKRKRKKEREKEKRRSKKRRKSKHKRHASSSDDFSDFSDDSDFSPSEKGHRKYREYSPPYAPSHQQYPPSHATPLPKKAYSKMDSKSYGMYEDYENEQYGEYEGDEEEDMGKEDYDDFTKELNQYRRAKEGSSRGRGSRGRGRGYRGRGSRGGSRGRGMGRGSRGRGRGSMGGDHPEDEEDFYEEEMDYGESEEPMGDDDYDEYSKELNQYRRSKDSRGRGLSRGRGRGSRGRGKGMGRGRGRGGSRGGMNKGGMNDDEDFYDEDMGDGGGGSYRSRDHDKPHQQSDKKGKVICKYFVEGRCTWGDHCNFSHDIELPKKRELCKFYITGFCARAENCPYMHGDFPCKLYHTTGNCINGDDCMFSHDPLTEETRELLDKMLADDAEAGAEDEKEVEELKKQGINPLPKPPPGVGLLPTPPRPPGPQAPTSPNGRPMQGGPPPPPPPPPPPPGPPQMPMPVHEPLSPQQLQQQDMYNKKIPSLFEIVVRPTGQLAEKLGVRFPGPGGPPGPMGPGPNMGPPGPMGGPMHPDMHPDMHPDMHPDMHADMHADMPMGPGMNPGPPMGPGGPPMMPYGPGDSPHSGMMPPIPPAQNFYENFYQQQEGMEMEPGLLGDAEDYGHYEELPGEPGEHLFPEHPLEPDSFSEGGPPGRPKPGAGVPDFLPSAQRALYLRIQQKQQEEEERARRLAESSKQDRENEEGDTGNWYSSDEDEGGSSVTSILKTLRQQTSSRPPASVGELSSSGLGDPRLQKGHPTGSRLADPRLSRDPRLTRHVEASGGSGPGDSGPSDPRLARALPTSKPEGSLHSSPVGPSSSKGSGPPPTEEEEGERALREKAVNIPLDPLPGHPLRDPRSQLQQFSHIKKDVTLSKPSFARTVLWNPEDLIPLPIPKQDAVPPVPAALQSMPTLDPRLHRAATAGPPNARQRPGASTDSSTQGANLPDFELLSRILKTVNATGSSAAPGSSDKPSDPRVRKAPTDPRLQKPTDSTASSRAAKPGPAEAPSPTASPSGDASPPATAPYDPRVLAAGGLGQGGGGGQSSVLSGISLYDPRTPNAGGKATEPAADTGAQPKGAEGNGKSSASKAKEPPFVRKSALEQPETGKAGADGGTPTDRYNSYNRPRPKAAAAPAATTATPPPEGAPPQPGVHNLPVPTLFGTVKQTPKTGSGSPFAGNSPAREGEQDAASLKDVFKGFDPTASPFCQ

SEQ ID NO: 15906 - protein, 1189 aa, Homo sapiens
MTDSEHAGHDREDGELEDGEIDDAGFEEIQEKEAKENEKQKSEKAYRKSRKKHKKEREKKKSKRRKREKHKHNSPSSDDSSDYSLDSDVEHTESSHKKRTGFYRDYDIPFTQRGHISGSYITSKKGQHNKKFKSKEYDEYSTYSDDNFGNYSDDNFGNYGQETEEDFANQLKQYRQAKETSNIALGSSFSKESGKKQRMKGVQQGIEQRVKSFNVGRGRGLPKKIKRKERGGRTNKGPNVFSVSDDFQEYNKPGKKWKVMTQEFINQHTVEHKGKQICKYFLEGRCIKGDQCKFDHDAELEKRKEICKFYLQGYCTKGENCIYMHNEFPCKFYHSGAKCYQGDNCKFSHDDLTKETKKLLDKVLNTDEELINEDERELEELRKRGITPLPKPPPGVGLLPTPPEHFPFSDPEDDFQTDFSDDFRKIPSLFEIVVKPTVDLAHKIGRKPPAFYTSASPPGPQFQGSSPHPQHIYSSGSSPGPGPNMSQGHSSPVMHPGSPGHHPCAGPPGLPVPQSPPLPPGPPEIVGPQNQAGVLVQPDTSLTPPSMGGAYHSPGFPGHVMKVPRENHCSPGSSYQQSPGEMQLNTNYESLQNPAEFYDNYYAQHSIHNFQPPNNSGDGMWHGEFAQQQPPVVQDSPNHGSGSDGSSTRTGHGPLPVPGLLPAVQRALFVRLTQRYQEDEEQTSTQPHRAPSKEEDDTVNWYSSSEEEEGSSVKSILKTLQKQTETLRNQQQPSTELSTPTDPRLAKEKSKGNQVVDPRLRTIPRQDIRKPSESAPLDLRLAWDPRKLRGNGSGHIGSSVGGAKFDLHHANAGTNVKHKRGDDDDEDTERELREKAFLIPLDASPGIMLQDPRSQLRQFSHIKMDITLTKPNFAKHIVWAPEDLLPVPLPKPDPVSSINLPLPPLIADQRLNRLWNTKSDLHQNTVSIDPKLAAKAKINTTNREGYLEQFGDSHGSGAKLGDPRLQKNFDPRLHRLPNTESHQVVMKDSHASKGAPHLPRSNPGSSQPSGAGTSNSGSGALPPYAPKLSSSAGLPLGTSTSVLSGISLYDPRDHGSSSTSELATASSGENSKNQKKSGGLKSSDKTEPSPGEAILPQKPSPNVGVTLEGPADPQADVPRSSGKVQVPAVHSLPVQALTGLIRPQYSDPRQARQPGQGSPTPDNDPGRETDDKSLKEVFKTFDPTASPFC

SEQ ID NO: 15907 - protein, 971 aa, Homo sapiens
MSNVSEERRKRQQNIKEGLQFIQSPLSYPGTQEQYAVYLRALVRNLFNEGNDVYREHDWNNSISQYTEALNIADYAKSEEILIPKEIIEKLYINRIACYSNMGFHDKVLEDCNIVLSLNASNCKALYRKSKALSDLGRYKKAYDAVAKCSLAVPQDEHVIKLTQELAQKLGFKIRKAYVRAELSLKSVPGDGATKALNHSVEDIEPDLLTPRQEAVPVVSLPAPSFSHEVGSELASVPVMPLTSILPLQVEESALPSAVLANGGKMPFTMPEAFLDDGDMVLGDELDDLLDSAPETNETVMPSALVRGPLQTASVSPSMPFSASLLGTLPIGARYAPPPSFSEFYPPLTSSLEDFCSSLNSFSMSESKRDLSTSTSREGTPLNNSNSSLLLMNGPGSLFASENFLGISSQPRNDFGNFFGSAVTKPSSSVTPRHPLEGTHELRQACQICFVKSGPKLMDFTYHANIDHKCKKDILIGRIKNVEDKSWKKIRPRPTKTNYEGPYYICKDVAAEEECRYSGHCTFAYCQEEIDVWTLERKGAFSREAFFGGNGKINLTVFKLLQEHLGEFIFLCEKCFDHKPRMISKRNKDNSTACSHPVTKHEFEDNKCLVHILRETTVKYSKIRSFHGQCQLDLCRHEVRYGCLREDECFYAHSLVELKVWIMQNETGISHDAIAQESKRYWQNLEANVPGAQVLGNQIMPGFLNMKIKFVCAQCLRNGQVIEPDKNRKYCSAKARHSWTKDRRAMRVMSIERKKWMNIRPLPTKKQMPLQFDLCNHIASGKKCQYVGNCSFAHSPEEREVWTYMKENGIQDMEQFYELWLKSQKNEKSEDIASQSNKENGKQIHMPTDYAEVTVDFHCWMCGKNCNSEKQWQGHISSEKHKEKVFHTEDDQYCWQHRFPTGYFSICDRYMNGTCPEGNSCKFAHGNAELHEWEERRDALKMKLNKARKDHLIGPNDNDFGKYSFLFKDLN

SEQ ID NO: 15908 - protein, 993 aa, Homo sapiens
MERQKRKADIEKGLQFIQSTLPLKQEEYEAFLLKLVQNLFAEGNDLFREKDYKQALVQYMEGLNVADYAASDQVALPRELLCKLHVNRAACYFTMGLYEKALEDSEKALGLDSESIRALFRKARALNELGRHKEAYECSSRCSLALPHDESVTQLGQELAQKLGLRVRKAYKRPQELETFSLLSNGTAAGVADQGTSNGLGSIDDIETGNVPDTREQVEIGAPRDCYVDPRGSPALLPSTPTMPLFPHVLDLLAPLDSSRTLPSTDSLDDFSDGDVFGPELDTLLDSLSLVQGGLSGSGVPSELPQLIPVFPGGTPLLPPVVGGSIPVSSPLPPASFGLVMDPSKKLAASVLDALDPPGPTLDPLDLLPYSETRLDALDSFGSTRGSLDKPDSFMEETNSQDHRPPSGAQKPAPSPEPCMPNTALLIKNPLAATHEFKQACQLCYPKTGPRAGDYTYREGLEHKCKRDILLGRLRSSEDQTWKRIRPRPTKTSFVGSYYLCKDMINKQDCKYGDNCTFAYHQEEIDVWTEERKGTLNRDLLFDPLGGVKRGSLTIAKLLKEHQGIFTFLCEICFDSKPRIISKGTKDSPSVCSNLAAKHSFYNNKCLVHIVRSTSLKYSKIRQFQEHFQFDVCRHEVRYGCLREDSCHFAHSFIELKVWLLQQYSGMTHEDIVQESKKYWQQMEAHAGKASSSMGAPRTHGPSTFDLQMKFVCGQCWRNGQVVEPDKDLKYCSAKARHCWTKERRVLLVMSKAKRKWVSVRPLPSIRNFPQQYDLCIHAQNGRKCQYVGNCSFAHSPEERDMWTFMKENKILDMQQTYDMWLKKHNPGKPGEGTPISSREGEKQIQMPTDYADIMMGYHCWLCGKNSNSKKQWQQHIQSEKHKEKVFTSDSDASGWAFRFPMGEFRLCDRLQKGKACPDGDKCRCAHGQEELNEWLDRREVLKQKLAKARKDMLLCPRDDDFGKYNFLLQEDGDLAGATPEAPAAAATATTGE

SEQ ID NO: 15909 - protein, 291 aa, Homo sapiens [sequence omitted]

SEQ ID NO: 15910 - protein, 1644 aa, Homo sapiens
MEESKTLKSENHEPKKNVICEESKAVQVIGNQTLKARNDKSVKEIENSSPNRNSSKKNKQNDICIEKTEVKSCKVNAANLPGPKDLGLVLRDQSHCKAKKFPNSPVKAEKATISQAKSEKATSLQAKAEKSPKSPNSVKAEKASSYQMKSEKVPSSPAEAEKGPSLLLKDMRQKTELQQIGKKIPSSFTSVDKVNIEAVGGEKCALQNSPRSQKQQTCTDNTGDSDDSASGIEDVSDDLSKMKNDESNKENSSEMDYLENATVIDESALTPEQRLGLKQAEERLERDHIFRLEKRSPEYTNCRYLCKLCLIHIENIQGAHKHIKEKRHKKNILEKQEESELRSLPPPSPAHLAALSVAVIELAKEHGITDDDLRVRQEIVEEMSKVITTFLPECSLRLYGSSLTRFALKSSDVNIDIKFPPKMNHPDLLIKVLGILKKNVLYVDVESDFHAKVPVVVCRDRKSGLLCRVSAGNDMACLTTDLLTALGKIEPVFIPLVLAFRYWAKLCYIDSQTDGGIPSYCFALMVMFFLQQRKPPLLPCLLGSWIEGFDPKRMDDFQLKGIVEEKFVKWECNSSSATEKNSIAEENKAKADQPKDDTKKTETDNQSNAMKEKHGKSPLALETPNRVSLGQLWLELLKFYTLDFALEEYVICVRIQDILTRENKNWPKRRIAIEDPFSVKRNVARSLNSQLVYEYVVERFRAAYRYFACPQTKGGNKSTVDFKKREKGKISNKKPVKSNNMATNGCILLGETTEKINAEREQPVQCDEMDCTSQRCIIDNNNLLVNELDFADHGQDSSSLSTSKSSEIEPKLDKKQDDLAPSETCLKKELSQCNCIDLSKSPDPDKSTGTDCRSNLETESSHQSVCTDTSATSCNCKATEDASDLNDDDNLPTQELYYVFDKFILTSGKPPTIVCSICKKDGHSKNDCPEDFRKIDLKPLPPMTNRFREILDLVCKRCFDELSPPCSEQHNREQILIGLEKFIQKEYDEKARLCLFGSSKNGFGFRDSDLDICMTLEGHENAEKLNCKEIIENLAKILKRHPGLRNILPITTAKVPIVKFEHRRSGLEGDISLYNTLAQHNTRMLATYAAIDPRVQYLGYTMKVFAKRCDIGDASRGSLSSYAYILMVLYFLQQRKPPVIPVLQEIFDGKQIPQRMVDGWNAFFFDKTEELKKRLPSLGKNTESLGELWLGLLRFYTEEFDFKEYVISIRQKKLLTTFEKQWTSKCIAIEDPFDLNHNLGAGVSRKMTNFIMKAFINGRKLFGTPFYPLIGREAEYFFDSRVLTDGELAPNDRCCRVCGKIGHYMKDCPKRKSLLFRLKKKDSEEEKEGNEEEKDSRDVLDPRDLHDTRDFRDPRDLRCFICGDAGHVRRECPEVKLARQRNSSVAAAQLVRNLVNAQQVAGSAQQQGDQSIRTRQSSECSESPSYSPQPQPFPQNSSQSAAITQPSSQPGSQPKLGPPQQGAQPPHQVQMPLYNFPQSPPAQYSPMHNMGLLPMHPLQIPAPSWPIHGPVIHSAPGSAPSNIGLNDPSIIFAQPAARPVAIPNTSHDGHWPRTVAPNSLVNSGAVGNSEPGFRGLTPPIPWEHAPRPHFPLVPASWPYGLHQNFMHQGNARFQPNKPFYTQDRCATRRCRERCPHPPRGNVSE

SEQ ID NO: 15911 - protein, 1495 aa, Homo sapiens
MGDTAKPYFVKRTKDRGTMDDDDFRRGHPQQDYLIIDDHAKGHGSKMEKGLQKKKITPGNYGNTPRKGPCAVSSNPYAFKNPIYSQPAWMNDSHKDQSKRWLSDEHTGNSDNWREFKPGPRIPVINRQRKDSFQENEDGYRWQDTRGCRTVRRLFHKDLTSLETTSEMEAGSPENKKQRSRPRKPRKTRNEENEQDGDLEGPVIDESVLSTKELLGLQQAEERLKRDCIDRLKRRPRNYPTAKYTCRLCDVLIESIAFAHKHIKEKRHKKNIKEKQEEELLTTLPPPTPSQINAVGIAIDKVVQEFGLHNENLEQRLEIKRIMENVFQHKLPDCSLRLYGSSCSRLGFKNSDVNIDIQFPAIMSQPDVLLLVQECLKNSDSFIDVDADFHARVPVVVCREKQSGLLCKVSAGNENACLTTKHLTALGKLEPKLVPLVIAFRYWAKLCSIDRPEEGGLPPYVFALMAIFFLQQRKEPLLPVYLGSWIEGFSLSKLGNFNLQDIEKDVVIWEHTDSAAGDTGITKEEAPRETPIKRGQVSLILDVKHQPSVPVGQLWVELLRFYALEFNLADLVISIRVKELVSRELKDWPKKRIAIEDPYSVKRNVARTLNSQPVFEYILHCLRTTYKYFALPHKITKSSLLKPLNAITCISEHSKEVINHHPDVQTKDDKLKNSVLAQGPGATSSAANTCKVQPLTLKETAESFGSPPKEEMGNEHISVHPENSDCIQADVNSDDYKGDKVYHPETGRKNEKEKVGRKGKHLLTVDQKRGEHVVCGSTRNNESESTLDLEGFQNPTAKECEGLATLDNKADLDGESTEGTEELEDSLNHFTHSVQGQTSEMIPSDEEEEDDEEEEEEEEPRLTINQREDEDGMANEDELDNTYTGSGDEDALSEEDDELGEAAKYEDVKECGKHVERALLVELNKISLKEENVCEEKNSPVDQSDFFYEFSKLIFTKGKSPTVVCSLCKREGHLKKDCPEDFKRIQLEPLPPLTPKFLNILDQVCIQCYKDFSPTIIEDQAREHIRQNLESFIRQDFPGTKLSLFGSSKNGFGFKQSDLDVCMTINGLETAEGLDCVRTIEELARVLRKHSGLRNILPITTAKVPIVKFFHLRSGLEVDISLYNTLALHNTRLLSAYSAIDPRVKYLCYTMKVFTKMCDIGDASRGSLSSYAYTLMVLYFLQQRNPPVIPVLQEIYKGEKKPEIFVDGWNIYFFDQIDELPTYWSECGKNTESVGQLWLGLLRFYTEEFDFKEHVISIRRKSLLTTFKKQWTSKYIVIEDPFDLNHNLGAGLSRKMTNFIMKAFINGRRVFGIPVKGFPKDYPSKMEYFFDPDVLTEGELAPNDRCCRICGKIGHFMKDCPMRRKVRRRRDQEDALNQRYPENKEKRSKEDKEIHNKYTEREVSTKEDKPIQCTPQKAKPMRAAADLGREKILRPPVEKWKRQDDKDLREKRCFICGREGHIKKECPQFKGSSGSLSSKYMTQGKASAKRTQQES

SEQ ID NO: 15912 - protein, 1124 aa, Homo sapiens
MADGPRCKRRKQANPRRNNVTNYNTVVETNSDSDDEDKLHIVEEESVTDAADCEGVPEDDLPTDQTVLPGRSSEREGNAKNCWEDDRKEGQEILGPEAQADEAGCTVKDDECESDAENEQNHDPNVEEFLQQQDTAVIFPEAPEEDQRQGTPEASGHDENGTPDAFSQLLTCPYCDRGYKRFTSLKEHIKYRHEKNEDNFSCSLCSYTFAYRTQLERHMTSHKSGRDQRHVTQSGCNRKFKCTECGKAFKYKHHLKEHLRIHSGEKPYECPNCKKRFSHSGSYSSHISSKKCISLIPVNGRPRTGLKTSQCSSPSLSASPGSPTRPQIRQKIENKPLQEQLSVNQIKTEPVDYEFKPIVVASGINCSTPLQNGVFTGGGPLQATSSPQGMVQAVVLPTVGLVSPISINLSDIQNVLKVAVDGNVIRQVLENNQANLASKEQETINASPIQQGGHSVISAISLPLVDQDGTTKIIINYSLEQPSQLQVVPQNLKKENPVATNSCKSEKLPEDLTVKSEKDKSFEGGVNDSTCLLCDDCPGDINALPELKHYDLKQPTQPPPLPAAEAEKPESSVSSATGDGNLSPSQPPLKNLLSLLKAYYALNAQPSAEELSKIADSVNLPLDVVKKWFEKMQAGQISVQSSEPSSPEPGKVNIPAKNNDQPQSANANEPQDSTVNLQSPLKMTNSPVLPVGSTTNGSRSSTPSPSPLNLSSSRNTQGYLYTAEGAQEEPQVEPLDLSLPKQQGELLERSTITSVYQNSVYSVQEEPLNLSCAKKEPQKDSCVTDSEPVVNVIPPSANPINIAIPTVTAQLPTIVAIADQNSVPCLRALAANKQTILIPQVAYTYSTTVSPAVQEPPLKVIQPNGNQDERQDTSSEGVSNVEDQNDSDSTPPKKKMRKTENGMYACDLCDKIFQKSSSLLRHKYEHTGKRPHECGICKKAFKHKHHLIEHMRLHSGEKPYQCDKCGKRFSHSGSYSQHMNHRYSYCKREAEERDSTEQEEAGPEILSNEHVGARASPSQGDSDERESLTREEDEDSEKEEEEEDKEMEELQEEKECEKPQGDEEEEEEEEEVEEEEVEEAENEGEEAKTEGLMKDDRAESQASSLGQKVGESSEQVSEEKTNEA

SEQ ID NO: 15913 - protein, 1214 aa, Homo sapiens
MKQPIMADGPRCKRRKQANPRRKNVVNYDNVVDTGSETDEEDKLHIAEDDGIANPLDQETSPASVPNHESSPHVSQALLPREEEEDEIREGGVEHPWHNNEILQASVDGPEEMKEDYDTMGPEATIQTAINNGTVKNANCTSDFEEYFAKRKLEERDGHAVSIEEYLQRSDTAIIYPEAPEELSRLGTPEANGQEENDLPPGTPDAFAQLLTCPYCDRGYKRLTSLKEHIKYRHEKNEENFSCPLCSYTFAYRTQLERHMVTHKPGTDQHQMLTQGAGNRKFKCTECGKAFKYKHHLKEHLRIHSGEKPYECPNCKKRFSHSGSYSSHISSKKCIGLISVNGRMRNNIKTGSSPNSVSSSPTNSAITQLRNKLENGKPLSMSEQTGLLKIKTEPLDFNDYKVLMATHGFSGTSPFMNGGLGATSPLGVHPSAQSPMQHLGVGMEAPLLGFPTMNSNLSEVQKVLQIVDNTVSRQKMDCKAEEISKLKGYHMKDPCSQPEEQGVTSPNIPPVGLPVVSHNGATKSIIDYTLEKVNEAKACLQSLTTDSRRQISNIKKEKLRTLIDLVTDDKMIENHNISTPFSCQFCKESFPGPIPLHQHERYLCKMNEEIKAVLQPHENIVPNKAGVFVDNKALLLSSVLSEKGMTSPINPYKDHMSVLKAYYAMNMEPNSDELLKISIAVGLPQEFVKEWFEQRKVYQYSNSRSPSLERSSKPLAPNSNPPTKDSLLPRSPVKPMDSITSPSIAELHNSVTNCDPPLRLTKPSHFTNIKPVEKLDHSRSNTPSPLNLSSTSSKNSHSSSYTPNSFSSEELQAEPLDLSLPKQMKEPKSIIATKNKTKASSISLDHNSVSSSSENSDEPLNLTFIKKEFSNSNNLDNKSTNPVFSMNPFSAKPLYTALPPQSAFPPATFMPPVQTSIPGLRPYPGLDQMSFLPHMAYTYPTGAATFADMQQRRKYQRKQGFQGELLDGAQDYMSGLDDMTDSDSCLSRKKIKKTESGMYACDLCDKTFQKSSSLLRHKYEHTGKRPHQCQICKKAFKHKHHLIEHSRLHSGEKPYQCDKCGKRFSHSGSYSQHMNHRYSYCKREAEEREAAEREAREKGHLEPTELLMNRAYLQSITPQGYSDSEERESMPRDGESEKEHEKEGEDGYGKLGRQDGDEEFEEEEEESENKSMDTDPETIRDEEETGDHSMDDSSEDGKMETKSDHEEDNMEDGM

SEQ ID NO: 15914 - protein, 1243 aa, Homo sapiens
METRAAENTAIFMCKCCNLFSPNQSELLSHVSEKHMEEGVNVDEIIIPLRPLSTPEPPNSSKTGDEFLVMKRKRGRPKGSTKKSSTEEELAENIVSPTEDSPLAPEEGNSLPPSSLECSKCCRKFSNTRQLRKHICIIVLNLGEEEGEAGNESDLELEKKCKEDDREKASKRPRSQKTEKVQKISGKEARQLSGAKKPIISVVLTAHEAIPGATKIVPVEAGPPETGATNSETTSADLVPRRGYQEYAIQQTPYEQPMKSSRLGPTQLKIFTCEYCNKVFKFKHSLQAHLRIHTNEKPYKCPQCSYASAIKANLNVHLRKHTGEKFACDYCSFTCLSKGHLKVHIERVHKKIKQHCRFCKKKYSDVKNLIKHIRDAHDPQDKKVKEALDELCLMTREGKRQLLYDCHICERKFKNELDRDRHMLVHGDKWPFACELCGHGATKYQALELHVRKHPFVYVCAVCRKKFVSSIRLRTHIKEVHGAAQEALVFTSSINQSFCLLEPGGDIQQEALGDQLQLVEEEFALQGVNALKEEACPGDTQLEEGRKEPEAPGEMPAPAVHLASPQAESTALPPCELETTVVSSSDLHSQEVVSDDFLLKNDTSSAEAHAAPEKPPDMQHRSSVQTQGEVITLLLSKAQSAGSDQESHGAQSPLGEGQNMAVLSAGDPDPSRCLRSNPAEASDLLPPVAGGGDTITHQPDSCKAAPEHRSGITAFMKVLNSLQKKQMNTSLCERIRKVYGDLECEYCGKLFWYQVHFDMHVRTHTREHLYYCSQCHYSSITKNCLKRHVIQKHSNILLKCPTDGCDYSTPDKYKLQAHLKVHTALDKRSYSCPVCEKSFSEDRLIKSHIKTNHPEVSMSTISEVLGRRVQLKGLIGKRAMKCPYCDFYFMKNGSDLQRHIWAHEGVKPFKCSLCEYATRSKSNLKAHMNRHSTEKTHLCDMCGKKFKSKGTLKSHKLLHTADGKQFKCTVCDYTAAQKPQLLRHMEQHVSFKPFRCAHCHYSCNISGSLKRHYNRKHPNEEYANVGTGELAAEVLIQQGGLKCPVCSFVYGTKWEFNRHLKNKHGLKVVEIDGDPKWETATEAPEEPSTQYLHITEAEEDVQGTQAAVAALQDLRYTSESGDRLDPTAVNILQQIIELGAETHDATALASVVAMAPGTVTVVKQVTEEEPSSNHTVMIQETVQQASVELAEQHHLVVSSDDVEGIETVTVYTQGGEASEFIVYVQEAMQPVEEQAVEQPAQEL

SEQ ID NO: 15915 - protein, 2572 aa, Homo sapiens
MATLNSASTTGTTPSPGHNAPSLPSDTFSSSTPSDPVTKDPPAASSTSENMRSSEPGGQLLESGCGLVPPKEIGEPQEGPDCGHFPPNDPGVEKDKEQEEEEEGLPPMDLSNHLFFTAGGEAYLVAKLSLPGGSELLLPKGFPWGEAGIKEEPSLPFLAYPPPSHLTALHIQHGFDPIQGFSSSDQILSHDTSAPSPAACEERHGAFWSYQLAPNPPGDPKDGPMGNSGGNHVAVFWLCLLCRLGFSKPQAFMDHTQSHGVKLTPAQYQGLSGSPAVLQEGDEGCKALISFLEPKLPARPSSDIPLDNSSTVNMEANVAQTEDGPPEAEVQALILLDEEVMALSPPSPPTATWDPSPTQAKESPVAAGEAGPDWFPEGQEEDGGLCPPLNQSSPTSKEGGTLPAPVGSPEDPSDPPQPYRLADDYTPAPAAFQGLSLSSHMSLLHSRNSCKTLKCPKCNWHYKYQQTLDVHMREKHPESNSHCSYCSAGGAHPRLARGESYNCGYKPYRCDVCNYSTTTKGNLSIHMQSDKHLANLQGFQAGPGGQGSPPEASLPPSAGDKEPKTKSSWQCKVCSYETNISRNLRIHMTSEKHMQNVLMLHQGLPLGLPPGLMGPGPPPPPGATPTSPPELFQYFGPQALGQPQTPLAGPGLRPDKPLEAQLLLNGFHHVGAPARKFPTSAPGSLSPDAHLPPSQLLGSSSDSLPTSPPPDDSLSLKVFRCLVCQAFSTDSLELLLYHCSIGRSLPEAEWKEVAGDTHRCKLCCYGTQLKANFQLHLKTDKHAQKYQLAAHLREGGGAMGTPSPASLGDGAPYGSVSPLHLRCNICDFESNSKEKMQLHARGAAHEENSQIYKFLLDMEGAEAGAELGLYHCLLCAWETPSRLAVLQHLRTPAHRDAQAQRRLQLLQNGPTTEEGLAALQSILSFSHGQLRTPGKAPVTPLAEPPTPEKDAQNKTEQLASEETENKTGPSRDSANQTTVYCCPYCSFLSPESSQVRAHTLSQHAVQPKYRCPLCQEQLVGRPALHFHLSHLHNVVPECVEKLLLVATTVEMTFTTKVLSAPTLSPLDNGQEPPTHGPEPTPSRDQAAEGPNLTPEASPDPLPEPPLASVEVPDKPSGSPGQPPSPAPSPVPEPDAQAEDVAPPPTMAEEEEGTTGELRSAEPAPADSRHPLTYRKTTNFALDKFLDPARPYKCTVCKESFTQKNILLVHYNSVSHLHKMKKAAIDPSAPARGEAGAPPTTTAATDKPFKCTVCRVSYNQSSTLEIHMRSVLHQTRSRGTKTDSKIEGPERSQEEPKEGETEGEVGTEKKGPDTSGFISGLPFLSPPPPPLDLHRFPAPLFTPPVLPPFPLVPESLLKLQQQQLLLPFYLHDLKVGPKLTLAGPAPVLSLPAATPPPPPQPPKAELAEREWERPPMAKEGNEAGPSSPPDPLPNEAARTAAKALLENFGFELVIQYNEGKQAVPPPPTPPPPEALGGGDKLACGACGKLFSNMLILKTHEEHVHRRFLPFEALSRYAAQFRKSYDSLYPPLAEPPKPPDGSLDSPVPHLGPPFLVPEPEAGGTRAPEERSRAGGHWPIEEEESSRGNLPPLVPAGRRFSRTKFTEFQTQALQSFFETSAYPKDGEVERLASLLGLASRVVVVWFQNARQKARKNACEGGSMPTGGGTGGASGCRRCHATFSCVFELVRHLKKCYDDQTLEEEEEEAERGEEEEEVEEEEVEEEQGLEPPAGPEGPLPEPPDGEELSQAEATKAGGKEPEEKATPSPSPAHTCDQCAISFSSQDLLTSHRRLHFLPSLQPSAPPQLLDLPLLVFGERNPLVAATSPMPGPPLKRKHEDGSLSPTGSEAGGGGEGEPPRDKRLRTTILPEQLEILYRWYMQDSNPTRKMLDCISEEVGLKKRVVQVWFQNTRARERKGQFRSTPGGVPSPAVKPPATATPASLPKFNLLLGKVDDGTGREAPKREAPAFPYPTATLASGPQPFLPPGKEATTPTPEPPLPLLPPPPPSEEEGPEEPPKASPESEACSLSAGDLSDSSASSLAEPESPGAGGTSGGPGGGTGVPDGMGQRRYRTQMSSLQLKIMKACYEAYRTPTMQECEVLGEEIGLPKRVIQVWFQNARAKEKKAKLQGTAAGSTGGSSEGLLAAQRTDCPYCDVKYDFYVSCRGHLFSRQHLAKLKEAVRAQLKSESKCYDLAPAPEAPPALKAPPATTPASMPLGAAPTLPRLAPVLLSGPALAQPPLGNLAPFNSGPAASSGLLGLATSVLPTTTVVQTAGPGRPLPQRPMPDQTNTSTAGTTDPVPGPPTEPLGDKVSSERKPVAGPTSSSNDALKNLKALKTTVPALLGGQFLPFPLPPAGGTAPPAVFGPQLQGAYFQQLYGMKKGLFPMNPMIPQTLIGLLPNALLQPPPQPPEPTATAPPKPPELPAPGEGEAGEVDELLTGSTGISTVDVTHRYLCRQCKMAFDGEAPATAHQRSFCFFGRGSGGSMPPPLRVPICTYHCLACEVLLSGREALASHLRSSAHRRKAAPPQGGPPISITNAATAASAAVAFAKEEARLPHTDSNPKTTTTSTLLAL

SEQ ID NO: 15916 - protein, 3703 aa, Homo sapiens
MEGCDSPVVSGKDNGCGIPQHQQWTELNSTHLPDKPSSMEQSTGESHGPLDSLRAPFNERLAESTASAGPPSEPASKEVTCNECSASFASLQTYMEHHCPSARPPPPLREESASDTGEEGDEESDVENLAGEIVYQPDGSAYIVESLSQLTQGGGACGSGSGSGPLPSLFLNSLPGAGGKQGDPSCAAPVYPQIINTFHIASSFGKWFEGPDQAFPNTSALAGLSPVLHSFRVFDVRHKSNKDYLNSDGSAKSSCVSKDVPNNVDLSKFDGFVLYGKRKPILMCFLCKLSFGYVRSFVTHAVHDHRMTLSEDERKILSNKNISAIIQGIGKDKEPLVSFLEPKNKNFQHPLVSTANLIGPGHSFYGKFSGIRMEGEEALPAGSAAGPEQPQAGLLTPSTLLNLGGLTSSVLKTPITSVPLGPLASSPTKSSEGKDSGAAEGEKQEVGDGDCFSEKVEPAEEEAEEEEEEEEAEEEEEEEEEEEEEEEDEGCKGLFPSELDEELEDRPHEEPGAAAGSSSKKDLALSNQSISNSPLMPNVLQTLSRGTASTSSNSASSFVVFDGANRRNRLSFNSEGVRANVAEGGRRLDFADESANKDNATAPEPNESTEGDDGGFVPHHQHAGSLCELGVGECPSGSGVECPKCDTVLGSSRSLGGHMTMMHSRNSCKTLKCPKCNWHYKYQQTLEAHMKEKHPEPGGSCVYCKSGQPHPRLARGESYTCGYKPFRCEVCNYSTTTKGNLSIHMQSDKHLNNMQNLQNGGGEQVFSHTAGAAAAAVAAAAAAANISSSCGAPSPTKPKTKPTWRCEVCDYETNVARNLRIHMTSEKHMHNMMLLQQNMTQIQHNRHLGLGSLPSPAEAELYQYYLAQNMNLPNLKMDSAASDAQFMMSGFQLDPAGPMAAMTPALVGGEIPLDMRLGGGQLVSEELMNLGESFIQTNDPSLKLFQCAVCNKFTTDNLDMLGLHMNVERSLSEDEWKAVMGDSYQCKLCRYNTQLKANFQLHCKTDKHVQKYQLVAHIKEGGKANEWRLKCVAIGNPVHLKCNACDYYTNSLEKLRLHTVNSRHEASLKLYKHLQQHESGVEGESCYYHCVLCNYSTKAKLNLIQHVRSMKHQRSESLRKLQRLQKGLPEEDEDLGQIFTIRRCPSTDPEEAIEDVEGPSETAADPEELAKDQEGGASSSQAEKELTDSPATSKRISFPGSSESPLSSKRPKTAEEIKPEQMYQCPYCKYSNADVNRLRVHAMTQHSVQPMLRCPLCQDMLNNKIHLQLHLTHLHSVAPDCVEKLIMTVTTPEMVMPSSMFLPAAVPDRDGNSNLEEAGKQPETSEDLGKNILPSASTEQSGDLKPSPADPGSVREDSGFICWKKGCNQVFKTSAALQTHFNEVHAKRPQLPVSDRHVYKYRCNQCSLAFKTIEKLQLHSQYHVIRAATMCCLCQRSFRTFQALKKHLETSHLELSEADIQQLYGGLLANGDLLAMGDPTLAEDHTIIVEEDKEEESDLEDKQSPTGSDSGSVQEDSGSEPKRALPFRKGPNFTMEKFLDPSRPYKCTVCKESFTQKNILLVHYNSVSHLHKLKRALQESATGQPEPTSSPDNKPFKCNTCNVAYSQSSTLEIHMRSVLHQTKARAAKLEAASGSSNGTGNSSSISLSSSTPSPVSTSGSNTFTTSNPSSAGIAPSSNLLSQVPTESVGMPPLGNPIGANIASPSEPKEANRKKLADMIASRQQQQQQQQQQQQQQQQQQQAQTLAQAQAQVQAHLQQELQQQAALIQSQLFNPTLLPHFPMTTETLLQLQQQQHLLFPFYIPSAEFQLNPEVSLPVTSGALTLTGTGPGLLEDLKAQVQVPQQSHQQILPQQQQNQLSIAQSHSALLQPSQHPEKKNKLVIKEKEKESQRERDSAEGGEGNTGPKETLPDALKAKEKKELAPGGGSEPSMLPPRIASDARGNATKALLENFGFELVIQYNENKQKVQKKNGKTDQGENLEKLECDSCGKLFSNILILKSHQEHVHQNYFPFKQLERFAKQYRDHYDKLYPLRPQTPEPPPPPPPPPPPPLPAAPPQPASTPAIPASAPPITSPTIAPAQPSVPLTQLSMPMELPIFSPLMMQTMPLQTLPAQLPPQLGPVEPLPADLAQLYQHQLNPTLLQQQNKRPRTRITDDQLRVLRQYFDINNSPSEEQIKEMADKSGLPQKVIKHWFRNTLFKERQRNKDSPYNFSNPPITSLEELKIDSRPPSPEPPKQEYWGSKRSSRTRFTDYQLRVLQDFFDANAYPKDDEFEQLSNLLNLPTRVIVVWFQNARQKARKNYENQGEGKDGERRELTNDRYIRTSNLNYQCKKCSLVFQRIFDLIKHQKKLCYKDEDEEGQDDSQNEDSMDAMEILTPTSSSCSTPMPSQAYSAPAPSANNTASSAFLQLTAEAEELATFNSKTEAGDEKPKLAEAPSAQPNQTQEKQGQPKPELQQQEQPEQKTNTPQQKLPQLVSLPSLPQPPPQAPPPQCPLPQSSPSPSQLSHLPLKPLHTSTPQQLANLPPQLIPYQCDQCKLAFPSFEHWQEHQQLHFLSAQNQFIHPQFLDRSLDMPFMLFDPSNPLLASQLLSGAIPQIPASSATSPSTPTSTMNTLKRKLEEKASASPGENDSGTGGEEPQRDKRLRTTITPEQLEILYQKYLLDSNPTRKMLDHIAHEVGLKKRVVQVWFQNTRARERKGQFRAVGPAQAHRRCPFCRALFKAKTALEAHIRSRHWHEAKRAGYNLTLSAMLLDCDGGLQMKGDIFDGTSFSHLPPSSSDGQGVPLSPVSKTMELSPRTLLSPSSIKVEGIEDFESPSMSSVNLNFDQTKLDNDDCSSVNTAITDTTTGDEGNADNDSATGIATETKSSSAPNEGLTKAAMMAMSEYEDRLSSGLVSPAPSFYSKEYDNEGTVDYSETSSLADPCSPSPGASGSAGKSGDSGDRPGQKRFRTQMTNLQLKVLKSCFNDYRTPTMLECEVLGNDIGLPKRVVQVWFQNARAKEKKSKLSMAKHFGINQTSYEGPKTECTLCGIKYSARLSVRDHIFSQQHISKVKDTIGSQLDKEKEYFDPATVRQLMAQQELDRIKKANEVLGLAAQQQGMFDNTPLQALNLPTAYPALQGIPPVLLPGLNSPSLPGFTPSNTALTSPKPNLMGLPSTTVPSPGLPTSGLPNKPSSASLSSPTPAQATMAMGPQQPPQQQQQQQQPQVQQPPPPPAAQPPPTPQLPLQQQQQRKDKDSEKVKEKEKAHKGKGEPLPVPKKEKGEAPTATAATISAPLPTMEYAVDPAQLQALQAALTSDPTALLTSQFLPYFVPGFSPYYAPQIPGALQSGYLQPMYGMEGLFPYSPALSQALMGLSPGSLLQQYQQYQQSLQEAIQQQQQRQLQQQQQQKVQQQQPKASQTPVPPGAPSPDKDPAKESPKPEEQKNTPREVSPLLPKLPEEPEAESKSADSLYDPFIVPKVQYKLVCRKCQAGFSDEEAARSHLKSLCFFGQSVVNLQEMVLHVPTGGGGGGSGGGGGGGGGGGGGGSYHCLACESALCGEEALSQHLESALHKHRTITRAARNAKEHPSLLPHSACFPDPSTASTSQSAAHSNDSPPPPSAAAPSSASPHASRKSWPQVVSRASAAKPPSFPPLSSSSTVTSSSCSTSGVQPSMPTDDYSEESDTDLSQKSDGPASPVEGPKDPSCPKDSGLTSVGTDTFRL

SEQ ID NO: 15917 - protein, 3567 aa, Homo sapiens
METCDSPPISRQENGQSTSKLCGTTQLDNEVPEKVAGMEPDRENSSTDDNLKTDERKSEALLGFSVENAAATQVTSAKEIPCNECATSFPSLQKYMEHHCPNARLPVLKDDNESEISELEDSDVENLTGEIVYQPDGSAYIIEDSKESGQNAQTGANSKLFSTAMFLDSLASAGEKSDQSASAPMSFYPQIINTFHIASSLGKPFTADQAFPNTSALAGVGPVLHSFRVYDLRHKREKDYLTSDGSAKNSCVSKDVPNNVDLSKFDGCVSDGKRKPVLMCFLCKLSFGYIRSFVTHAVHDHRMTLNDEEQKLLSNKCVSAIIQGIGKDKEPLISFLEPKKSTSVYPHFSTTNLIGPDPTFRGLWSAFHVENGDSLPAGFAFLKGSASTSSSAEQPLGITQMPKAEVNLGGLSSLVVNTPITSVSLSHSSSESSKMSESKDQENNCERPKESNVLHPNGECPVKSEPTEPGDEDEEDAYSNELDDEEVLGELTDSIGNKDFPLLNQSISPLSSSVLKFIEKGTSSSSATVSDDTEKKKQTAAVRASGSVASNYGISGKDFADASASKDSATAAHPSEIARGDEDSSATPHQHGFTPSTPGTPGPGGDGSPGSGIECPKCDTVLGSSRSLGGHMTMMHSRNSCKTLKCPKCNWHYKYQQTLEAHMKEKHPEPGGSCVYCKTGQPHPRLARGESYTCGYKPFRCEVCNYSTTTKGNLSIHMQSDKHLNNVQNLQNGNGEQVFGHSAPAPNTSLSGCGTPSPSKPKQKPTWRCEVCDYETNVARNLRIHMTSEKHMHNMMLLQQNMKQIQHNLHLGLAPAEAELYQYYLAQNIGLTGMKLENPADPQLMINPFQLDPATAAALAPGLGELSPYISDPALKLFQCAVCNKFTSDSLEALSVHVSSERSLPEEEWRAVIGDIYQCKLCNYNTQLKANFQLHCKTDKHMQKYQLVAHIKEGGKSNEWRLKCIAIGNPVHLKCNACDYYTNSVDKLRLHTTNHRHEAALKLYKHLQKQEGAVNPESCYYYCAVCDYTTKVKLNLVQHVRSVKHQQTEGLRKLQLHQQGLAPEEDNLSEIFFVKDCPPNELETASLGARTCDDDLTEQHEEAEGAIKPTAVAEDDEKDTSERDNSEGKNSNKDSVSVAGGTQPLLLAKEEDVATKRSKPTEDNKFCHEQFYQCPYCNYNSRDQSRIQMHVLSQHSVQPVICCPLCQDVLSNKMHLQLHLTHLHSVSPDCVEKLLMTVPVPDVMMPNSMLLPAAASEKSERDTPAAVTAEGSGKYSGESPMDDKSMAGLEDSKANVEVKNEEQKPTKEPLEVSEWNKNSSKDVKIPDTLQDQLNEQQKRQPLSVSDRHVYKYRCNHCSLAFKTMQKLQIHSQYHAIRAATMCNLCQRSFRTFQALKKHLEAGHPELSEAELQQLYASLPVNGELWAESETMSQDDHGLEQEMEREYEVDHEGKASPVGSDSSSIPDDMGSEPKRTLPFRKGPNFTMEKFLDPSRPYKCTVCKESFTQKNILLVHYNSVSHLHKLKKVLQEASSPVPQETNSNTDNKPYKCSICNVAYSQSSTLEIHMRSVLHQTKARAAKLEPSGHVAGGHSIAANVNSPGQGMLDSMSLAAVNSKDTHLDAKELNKKQTPDLISAQPAHHPPQSPAQIQMQLQHELQQQAAFFQPQFLNPAFLPHFPMTPEALLQFQQPQFLFPFYIPGTEFSLGPDLGLPGSATFGMPGMTGMAGSLLEDLKQQIQTQHHVGQTQLQILQQQAQQYQATQPQLQPQKQQQQPPPPQQQQQQQASKLLKQEQSNIVSADCQIMKDVPSYKEAEDISEKPEKPKQEFISEGEGLKEGKDTKKQKSLEPSIPPPRIASGARGNAAKALLENFGFELVIQYNENRQKVQKKGKSGEGENTDKLECGTCGKLFSNVLILKSHQEHVHGQFFPYAALEKFARQYREAYDKLYPISPSSPETPPPPPPPPPLPPAPPQPSSMGPVKIPNTVSTPLQAPPPTPPPPPPPPPPPPPPPPPPPPSAPPQVQLPVSLDLPLFPSIMMQPVQHPALPPQLALQLPQMDALSADLTQLCQQQLGLDPNFLRHSQFKRPRTRITDDQLKILRAYFDINNSPSEEQIQEMAEKSGLSQKVIKHWFRNTLFKERQRNKDSPYNFSNPPITVLEDIRIDPQPTSLEHYKSDASFSKRSSRTRFTDYQLRVLQDFFDTNAYPKDDEIEQLSTVLNLPTRVIVVWFQNARQKARKSYENQAETKDNEKRELTNERYIRTSNMQYQCKKCNVVFPRIFDLITHQKKQCYKDEDDDAQDESQTEDSMDATDQVVYKHCTVSGQTDAAKNAAAPAASSGSGTSTPLIPSPKPEPEKTSPKPEYPAEKPKQSDPSPPSQGTKPALPLASTSSDPPQASTAQPQPQPQPPKQPQLIGRPPSASQTPVPSSPLQISMTSLQNSLPPQLLQYQCDQCTVAFPTLELWQEHQHMHFLAAQNQFLHSPFLERPMDMPYMIFDPNNPLMTGQLLGSSLTQMPPQASSSHTTAPTTVAASLKRKLDDKEDNNCSEKEGGNSGEDQHRDKRLRTTITPEQLEILYEKYLLDSNPTRKMLDHIAREVGLKKRVVQVWFQNTRARERKGQFRAVGPAQSHKRCPFCRALFKAKSALESHIRSRHWNEGKQAGYSLPPSPLISTEDGGESPQKYIYFDYPSLPLTKIDLSSENELASTVSTPVSKTAELSPKNLLSPSSFKAECSEDVENLNAPPAEAGYDQNKTDFDETSSINTAISDATTGDEGNTEMESTTGSSGDVKPALSPKEPKTLDTLPKPATTPTTEVCDDKFLFSLTSPSIHFNDKDGDHDQSFYITDDPDDNADRSETSSIADPSSPNPFGSSNPFKSKSNDRPGHKRFRTQMSNLQLKVLKACFSDYRTPTMQECEMLGNEIGLPKRVVQVWFQNARAKEKKFKINIGKPFMINQGGTEGTKPECTLCGVKYSARLSIRDHIFSKQHISKVRETVGSQLDREKDYLAPTTVRQLMAQQELDRIKKASDVLGLTVQQPGMMDSSSLHGISLPTAYPGLPGLPPVLLPGMNGPSSLPGFPQNSNISAGMLGFPTSATSSPALSLSSAPTKPLLQTPPPPPPPPPPPPSSSLSGQQTEQQNKESEKKQTKPNKVKKIKEEELEATKPEKHPKKEEKISSALSVLGKVVGETHVDPIQLQALQNAIAGDPASFIGGQFLPYFIPGFASYFTPQLPGTVQGGYFPPVCGMESLFPYGPTMPQTLAGLSPGALLQQYQQYQQNLQESLQKQQKQQQEQQQKPVQAKTSKVESDQPQNSNDASETKEDKSTATESTKEEPQLESKSADFSDTYVVPFVKYEFICRKCQMMFTDEDAAVNHQKSFCYFGQPLIDPQETVLRVPVSKYQCLACDVAISGNEALSQHLQSSLHKEKTIKQAMRNAKEHVRLLPHSVCSPNPNTTSTSQSAASSNNTYPHLSCFSMKSWPNILFQASARRAASPPSSPPSLSLPSTVTSSLCSTSGVQTSLPTESCSDESDSELSQKLEDLDNSLEVKAKPASGLDGNFNSIRMDMFSV

SEQ ID NO: 15918 - protein, 407 aa, Homo sapiens
MNKSQGSVSFTDVTVDFTQEEWEQLDPSQRILYMDVMLENYSNLLSVEVWKADDQMERDHRNPDEQARQFLILKNQTPIEERGDLFGKALNLNTDFVSLRQVPYKYDLYEKTLKYNSDLLNSNRSYAGKQTDECNEFGKALLYLKQEKTHSGVEYSEYNKSGKALSHKAAIFKHQKIKNLVQPFICTYCDKAFSFKSLLISHKRIHTGEKPYECNVCKKTFSHKANLIKHQRIHTGEKPFECPECGKAFTHQSNLIVHQRAHMEKKPYECSECGKTFAQKFELTTHQRIHTGERPYECNECAKTFFKKSNLIIHQKIHTGEKRYECSECGKSFIQNSQLIIHMRTHTGEKPYECTECGKTFSQRSTLRLHLRIHTGEKPYECSECGKAFSRKSRLSVHQRVHIGEKP

SEQ ID NO: 15919 - protein, 533 aa, Homo sapiens
MAHGSVTFRDVAIDFSQEEWEFLDPAQRDLYRDVMWENYSNFISLGPSISKPDVITLLDEERKEPGMVVREGTRRYCPDLESRYRTNTLSPEKDIYEIYSFQWDIMERIKSYSLQGSIFRNDWECKSKIEGEKEQQEGYFGQVKITSEKMTTYKRHNFLTEYQIVHNGEKVYECKECRKTFIRRSTLSQHLRIHTGEKPYKCKECGQAFRQRAHLIRHHKLHTGEKPYECKECGKAFTVLQELTQHQRLHTGEKPYECKECGKAFRVHQQLARHQRIHTGEKPYECKDCGKTFRQCTHLTRHQRLHTAEKLYECKECGKAFVCGPDLRVHQKIHFGEKPYECKECGKAFRICQQLTVHQSIHTGEKPYECKECGKTFRLRQQLVRHQRIHTREKPYECMECWKTFSSYSQLISHQSIHIGERPYECEECGKAFRLLSQLTQHQSIHTGEKPYECKECRKPFRLLSQLTQHQSIHTGEKPYECKECGKAFRLYSFLTQHQRIHTGEKPYKCKECKKAFRQHSHLTQHQKIHNGI

SEQ ID NO: 15920 - protein, 461 aa, Homo sapiens
MEREGIWHSTLGETWEPNNWLEGQQDSHLSQVGVTHKETFTEMRVCGGNEFERCSSQDSILDTQQSIPMVKRPHNCNSHGEDATQNSELIKTQRMFVGKKIYECNQCSKTFSQSSSLLKHQRIHTGEKPYKCNVCGKHFIERSSLTVHQRIHTGEKPYKCNECGKAFSQSMNLTVHQRTHTGEKPYQCKECGKAFHKNSSLIQHERIHTGEKPYKCNECGKAFTQSMNLTVHQRTHTGEKPYECNECGKAFSQSMHLIVHQRSHTGEKPYECSQCGKAFSKSSTLTLHQRNHTGEKPYKCNKCGKSFSQSTYLIEHQRLHSGVKPFECNECGKAFSKNSSLTQHRRIHTGEKPYECMVCGKHFTGRSSLTVHQVIHTGEKPYECNECGKAFSQSAYLIEHQRIHTGEKPYECDQCGKAFIKNSSLTVHQRTHTGEKPYQCNECGKAFSRSTNLTRHQRTHT

SEQ ID NO: 15921 - protein, 868 aa, Homo sapiens
MRGAASASVREPTPLPGRGAPRTKPRAGRGPTVGTPATLALPARGRPRSRNGLASKGQRGAAPTGPGHRALPSRDTALPQERNKKLEAVGTGIEPKAMSQGLVTFGDVAVDFSQEEWEWLNPIQRNLYRKVMLENYRNLASLGLCVSKPDVISSLEQGKEPWTVKRKMTRAWCPDLKAVWKIKELPLKKDFCEGKLSQAVITERLTSYNLEYSLLGEHWDYDALFETQPGLVTIKNLAVDFRQQLHPAQKNFCKNGIWENNSDLGSAGHCVAKPDLVSLLEQEKEPWMVKRELTGSLFSGQRSVHETQELFPKQDSYAEGVTDRTSNTKLDCSSFRENWDSDYVFGRKLAVGQETQFRQEPITHNKTLSKERERTYNKSGRWFYLDDSEEKVHNRDSIKNFQKSSVVIKQTGIYAGKKLFKCNECKKTFTQSSSLTVHQRIHTGEKPYKCNECGKAFSDGSSFARHQRCHTGKKPYECIECGKAFIQNTSLIRHWRYYHTGEKPFDCIDCGKAFSDHIGLNQHRRIHTGEKPYKCDVCHKSFRYGSSLTVHQRIHTGEKPYECDVCRKAFSHHASLTQHQRVHSGEKPFKCKECGKAFRQNIHLASHLRIHTGEKPFECAECGKSFSISSQLATHQRIHTGEKPYECKVCSKAFTQKAHLAQHQKTHTGEKPYECKECGKAFSQTTHLIQHQRVHTGEKPYKCMECGKAFGDNSSCTQHQRLHTGQRPYECIECGKAFKTKSSLICHRRSHTGEKPYECSVCGKAFSHRQSLSVHQRIHSGKKPYECKECRKTFIQIGHLNQHKRVHTGERSYNYKKSRKVFRQTAHLAHHQRIHTGESSTCPSLPSTSNPVDLFPKFLWNPSSLPSP

SEQ ID NO: 15922 - protein, 502 aa, Homo sapiens
MGTENKEVIPKEEISEESEPHGSLLEKFPKVVYQGHEFGAGCEEDMLEGHSRESMEEVIEQMSPQERDFPSGLMIFKKSPSSEKDRENNESERGCSPSPNLVTHQGDTTEGVSAFATSGQNFLEILESNKTQRSSVGEKPHTCKECGKAFNQNSHLIQHMRVHSGEKPFECKECGKTFGTNSSLRRHLRIHAGEKPFACNECGKAFIQSSHLIHHHRIHTGERPYKCEECGKAFSQNSALILHQRIHTGEKPYECNECGKTFRVSSQLIQHQRIHTEERYHECNECGKAFKHSSGLIRHQKIHTGEKPYLCNECGKGFGQSSELIRHQRIHTGDKPYECNECGKTFGQNSEIIRHIRIHTGEKPYVCKECGKAFRGNSELLRHERIHTGEKPYECFECGKAFRRTSHLIVHQRIHTGEKPHQCNECARTFWDNSELLLHQKIHIGEKPYECSECEKTFSQHSQLIIHQRIHTGEKPYECQECQKTFSRSSHLLRHQSVHCME

SEQ ID NO: 15923 - protein, 519 aa, Homo sapiens
MARDLVMFRDVAVDFSQEEWECLNSYQRNLYRDVILENYSNLVSLAGCSISKPDVITLLEQGKEPWMVVRDEKRRWTLDLESRYDTKKLFQGKDIYEMNLSQWKVMERIKSCGLEEQESPHEVCFRQVTKTTSEKMPTYRKLTSLPLYQKSHNREKPYECGECGKAFRVRQQLTFHQRIHTGEKPYECKECGKAFRQCAHLSRHQRIHTSDKLYECKKCGKIFTCGSDLRVHQRIHIGEKPYECKECGKAFRVRGQLNLHQRIHTGEKPYECKECGKAFRQYAHLTRHQRLNIAEKCYECKECGQAFLCSTGLRLHHKLHTGEKPYECKECGKAFRVRQQLTLHQRIHTGEKPYDCKECGKTFSRGYHLTLHQRIHTGEKPYECKECQKFFRRYSELISHQGIHIGEKPYECKECGKAFRLFSQLTQHQSIHFGEKPFKCKECEKTFRLLSQLTQHQSIHTGEKPYDCKECGKAFRLHSSLIQHQRIHSGEKPYKCKECKKAFRQHSHLTYHQRIHNVT

SEQ ID NO: 15924 - protein, 338 aa, Homo sapiens
MTTTLVSATIFDLSEVLCKGNKMLNYSAPSAGGCLLDRKAVGTPAGGGFPRRHSVTLPSSKFHQNQLLSSLKGEPAPALSSRDSRFRDRSFSEGGERLLPTQKQPGGGQVNSSRYKTELCRPFEENGACKYGDKCQFAHGIHELRSLTRHPKYKTELCRTFHTIGFCPYGPRCHFIHNAEERRALAGARDLSADRPRLQHSFSFAGFPSAAATAAATGLLDSPTSITPPPILSADDLLGSPTLPDGTNNPFAFSSQELASLFAPSMGLPGGGSPTTFLFRPMSESPHMFDSPPSPQDSLSDQEGYLSSSSSSHSGSDSPTLDNSRRLPIFSRLSISDD

SEQ ID NO: 15925 - protein, 494 aa, Homo sapiens
MSTTLLSAFYDVDFLCKTEKSLANLNLNNMLDKKAVGTPVAAAPSSGFAPGFLRRHSASNLHALAHPAPSPGSCSPKFPGAANGSSCGSAAAGGPTSYGTLKEPSGGGGTALLNKENKFRDRSFSENGDRSQHLLHLQQQQKGGGGSQINSTRYKTELCRPFEESGTCKYGEKCQFAHGFHELRSLTRHPKYKTELCRTFHTIGFCPYGPRCHFIHNADERRPAPSGGASGDLRAFGTRDALHLGFPREPRPKLHHSLSFSGFPSGHHQPPGGLESPLLLDSPTSRTPPPPSCSSASSCSSSASSCSSASAASTPSGAPTCCASAAAAAAAALLYGTGGAEDLLAPGAPCAACSSASCANNAFAFGPELSSLITPLAIQTHNFAAVAAAAYYRSQQQQQQQGLAPPAQPPAPPSATLPAGAAAPPSPPFSFQLPRRLSDSPVFDAPPSPPDSLSDRDSYLSGSLSSGSLSGSESPSLDPGRRLPIFSRLSISDD

SEQ ID NO: 15926 - protein, 630 aa, Homo sapiens
MSVSSGVQILTKPETVDRRRSAETTKEAGRPLEMAVSEPEASAAEWKQLDPAQSNLYNDVMLENYCNQASMGCQAPKPDMISKLEKGEAPWLGKGKRPSQGCPSKIARPKQKETDGKVQKDDDQLENIQKSQNKLLREVAVKKKTQAKKNGSDCGSLGKKNNLHKKHVPSKKRLLKFESCGKILKQNLDLPDHSRNCVKRKSDAAKEHKKSFNHSLSDTRKGKKQTGKKHEKLSSHSSSDKCNKTGKKHDKLCCHSSSHIKQDKIQTGEKHEKSPSLSSSTKHEKPQACVKPYECNQCGKVLSHKQGLIDHQRVHTGEKPYECNECGIAFSQKSHLVVHQRTHTGEKPYECIQCGKAHGHKHALTDHLRIHTGEKPYECAECGKTFRHSSNLIQHVRSHTGEKPYECKECGKSFRYNSSLTEHVRTHTGEIPYECNECGKAFKYSSSLTKHMRIHTGEKPFECNECGKAFSKKSHLIIHQRTHTKEKPYKCNECGKAFGHSSSLTYHMRTHTGESPFECNQCGKGFKQIEGLTQHQRVHTGEKPYECNECGKAFSQKSHLIVHQRTHTGEKPYECNECEKAFNAKSQLVIHQRSHTGEKPYECNECGKTFKQNASLTKHVKTHSEDKSHE

SEQ ID NO: 15927 - protein, 198 aa, Homo sapiens
MEKPAGRKKKTPTPREEADVQKSALREEKVSGDRKPPERPTVPRKPRTEPCLSPEDEEHVFDAFDASFKDDFEGVPVFIPFQRKKPYECSECGRIFKHKTDHIRHQRVHTGEKPFKCAQCGKAFRHSSDVTKHQRTHTGEKPFKCGECGKAFNCGSNLLKHQKTHTGEKPYECTHCGKAFAYSSCLIRHQKRHPRKKP

SEQ ID NO: 15928 - protein, 310 aa, Homo sapiens
MSQQLKKRAKTRHQKGLGGRAPSGAKPRQGKSSQDLQAEIEPVSAVWALCDGYVCYEPGPQALGGDDFSDCYIECVIRGEFSQPILEEDSLFESLEYLKKGSEQQLSQKVFEASSLECSLEYMKKGVKKELPQKIVGENSLEYSEYMTGKKLPPGGIPGIDLSDPKQLAEFARKKPPINKEYDSLSAIACPQSGCTRKLRNRAALRKHLLIHGPRDHVCAECGKAFVESSKLKRHFLVHTGEKPFRCTFEGCGKRFSLDFNLRTHVRIHTGEKRFVCPFQGCNRRFIQSNNLKAHILTHANTNKNEQEGK

SEQ ID NO: 15929 - protein, 452 aa, Homo sapiens
MAAGEPRSLLFFQKPVTFEDVAVNFTQEEWDCLDASQRVLYQDVMSETFKNLTSVARIFLHKPELITKLEQEEEQWRETRVLQASQAGPPFFCYTCGKCFSRRSYLYSHQFVHNPKLTNSCSQCGKLFRSPKSLSYHRRMHLGERPFCCTLCDKTYCDASGLSRHRRVHLGYRPHSCSVCGKSFRDQSELKRHQKIHQNQEPVDGNQECTLRIPGTQAEFQTPIARSQRSIQGLLDVNHAPVARSQEPIFRTEGPMAQNQASVLKNQAPVTRTQAPITGTLCQDARSNSHPVKPSRLNVFCCPHCSLTFSKKSYLSRHQKAHLTEPPNYCFHCSKSFSSFSRLVRHQQTHWKQKSYLCPICDLSFGEKEGLMDHWRGYKGKDLCQSSHHKCRVILGQWLGFSHDVPTMAGEEWKHGGDQSPPRIHTPRRRGLREKACKGDKTKEAVSILKHK

SEQ ID NO: 15930 - protein, 900 aa, Homo sapiens
MSHLKTSTEDEEPTEEYENVGNAASKWPKVEDPMPESKVGDTCVWDSKVENQQKKPVENRMKEDKSSIREAISKAKSTANIKTEQEGEASEKSLHLSPQHITHQTMPIGQRGSEQGKRVENINGTSYPSLQQKTNAVKKLHKCDECGKSFKYNSRLVQHKIMHTGEKRYECDDCGGTFRSSSSLRVHKRIHTGEKPYKCEECGKAYMSYSSLINHKSTHSGEKNCKCDECGKSFNYSSVLDQHKRIHTGEKPYECGECGKAFRNSSGLRVHKRIHTGEKPYECDICGKTFSNSSGLRVHKRIHTGEKPYECDECGKAFITCRTLLNHKSIHFGDKPYKCDECEKSFNYSSLLIQHKVIHTGEKPYECDECGKAFRNSSGLIVHKRIHTGEKPYKCDVCGKAFSYSSGLAVHKSIHPGKKAHECKECGKSFSYNSLLLQHRTIHTGERPYVCDVCGKTFRNNAGLKVHRRLHTGEKPYKCDVCGKAYISRSSLKNHKGIHLGEKPYKCSYCEKSFNYSSALEQHKRIHTREKPFGCDECGKAFRNNSGLKVHKRIHTGERPYKCEECGKAYISLSSLINHKSVHPGEKPFKCDECEKAFITYRTLTNHKKVHLGEKPYKCDVCEKSFNYTSLLSQHRRVHTREKPYECDRCEKVFRNNSSLKVHKRIHTGERPYECDVCGKAYISHSSLINHKSTHPGRTPHTCDECGKAFFSSRTLISHKRVHLGEKPFKCVECGKSFSYSSLLSQHKRIHTGEKPYVCDRCGKAFRNSSGLTVHKRIHTGEKPYECDECGKAYISHSSLINHKSVHQGKQPYNCECGKSFNYRSVLDQHKRIHTGKKPYRCNECGKAFNIRSNLTKHKRTHTGEESLNVIYVGSYSGTSQKRTYEGGNALDGGRMRMPL

SEQ ID NO: 15931 - protein, 681 aa, Homo sapiens
MNASSEGESFAGSVQIPGGTTVLVELTPDIHICGICKQQFNNLDAFVAHKQSGCQLTGTSAAAPSTVQFVSEETVPATQTQTTTRTITSETQTITVSAPEFVFEHGYQTYLPTESNENQTATVISLPAKSRTKKPTTPPAQKRLNCCYPGCQFKTAYGMKDMERHLKIHTGDKPHKCEVCGKCFSRKDKLKTHMRCHTGVKPYKCKTCDYAAADSSSLNKHLRIHSDERPFKCQICPYASRNSSQLTVHLRSHTGDAPFQCWLCSAKFKISSDLKRHMRVHSGEKPFKCEFCNVRCTMKGNLKSHIRIKHSGNNFKCPHCDFLGDSKATLRKHSRVHQSEHPEKCSECSYSCSSKAALRIHERIHCTDRPFKCNYCSFDTKQPSNLSKHMKKFHGDMVKTEALERKDTGRQSSRQVAKLDAKKSFHCDICDASFMREDSLRSHKRQHSEYSESKNSDVTVLQFQIDPSKQPATPLTVGHLQVPLQPSQVPQFSEGRVKIIVGHQVPQANTIVQAAAAAVNIVPPALVAQNPEELPGNSRLQILRQVSLIAPPQSSRCPSEAGAMTQPAVLLTTHEQTDGATLHQTLIPTASGGPQEGSGNQTFITSSGITCTDFEGLNALIQEGTAEVTVVSDGGQNIAVATTAPPVFSSSSQQELPKQTYSIIQGAAHPALLCPADSIPD

SEQ ID NO: 15932 - protein, 645 aa, Homo sapiens
MNASSEGESFAGSVQIPGGTTVLVELTPDIHICGICKQQFNNLDAFVAHKQSGCQLTGTSAAAPSTVQFVSEETVPATQTQTTTRTITSETQTITVSAPEFVFEHGYQTYLPTESNENQTATVISLPAKSRTKKPTTPPAQKRLNCCYPGCQFKTAYGMKDMERHLKIHTGDKPHKCEVCGKCFSRKDKLKTHMRCHTGVKPYKCKTCDYAAADSSSLNKHLRIHSDERPFKCQICPYASRNSSQLTVHLRSHTASELDDDVPKANCLSTESTDTPKAPVITLPSEAREQMATLGERTFNCCYPGCHFKTVHGMKDLDRHLRIHTGDKPHKCEFCDKCFSRKDNLTMHMRCHTSVKPHKCHLCDYAAVDSSSLKKHLRIHSDERPYKCQLCPYASRNSSQLTVHLRSHTGDTPFQCWLCSAKFKISSDLKRHMIVHSGEKPFKCEFCDVRCTMKANLKSHIRIKHTFKCLHCAFQGRDRADLLEHSRLHQADHPEKCPECSYSCSSAAALRVHSRVHCKDRPFKCDFCSFDTKRPSSLAKHVDKVHRDEAKTENRAPLGKEGLREGSSQHVAKIVTQRAFRCETCGASFVRDDSLRCHKKQHSDQSENKNSDLVTFPPESGASGQLSTLVSVGQLEAPLEPSQDL

SEQ ID NO: 15933 - protein, 526 aa, Homo sapiens
MPQQLLITLPTEASTWVKLQHPKKAVEGAPLWEDVTKMFEGEALLSQDAEDVKTQRESLEDEVTPGLPTAESQELLTFKDISIDFTQEEWGQLAPAHQNLYREVMLENYSNLVSVGYQLSKPSVISQLEKGEEPWMAEKEGPGDPSSDLKSKIETIESTAKSTISQERLYHGIMMESFMRDDIIYSTLRKVSTYDDVLERHQETCMRDVRQAILTHKKRVQETNKFGENIIVHSNVIIEQRHHKYDTPTKRNTYKLDLINHPTSYIRTKTYECNICEKIFKQPIHLTEHMRIHTGEKPFRCKECGRAFSQSASLSTHQRIHTGEKPFECEECGKAFRHRSSLNQHHRTHTGEKPYVCDKCQKAFSQNISLVQHLRTHSGEKPFTCNECGKTFRQIRHLSEHIRIHTGEKPYACTACCKTFSHRAYLTHHQRIHTGERPYKCKECGKAFRQRIHLSNHKTVHTGVKAYECNRCGKAYRHDSSFKKHQRHHTGEKPYECNECGKAFSYNSSLSRHHEIHRRNAFRNKV

SEQ ID NO: 15934 - protein, 534 aa, Homo sapiens
MLQQLLITLPTEASTWVKLRHPKAATERVALWEDVTKMFKAEALLSQDADETQGESLESRVTLGSLTAESQELLTFKDVSVDFTQEEWGQLAPAHRNLYREVMLENYGNLVSVGCQLSKPGVISQLEKGEEPWLMERDISGVPSSDLKSKTKTKESALQNDISWEELHCGLMMERFTKGSSMYSTLGRISKCNKLESQQENQRMGKGQIPLMCKKTFTQERGQESNRFEKRINVKSEVMPGPIGLPRKRDRKYDTPGKRSRYNIDLVNHSRSYTKMKTFECNICEKIFKQLIHLTEHMRIHTGEKPFRCKECGKAFSQSSSLIPHQRIHTGEKPYECKECGKTFRHPSSLTQHVRIHTGEKPYECRVCEKAFSQSIGLIQHLRTHVREKPFTCKDCGKAFFQIRHLRQHEIIHTGVKPYICNVCSKTFSHSTYLTQHQRTHTGERPYKCKECGKAFSQRIHLSIHQRVHTGVKPYECSHCGKAFRHDSSFAKHQRIHTGEKPYDCNECGKAFSCSSSLIRHCKTHLRNTFSNVV

SEQ ID NO: 15935 - protein, 532 aa, Homo sapiens
MALRSVMFSDVSIDFSPEEWEYLDLEQKDLYRDVMLENYSNLVSLGCFISKPDVISSLEQGKEPWKVVRKGRRQYPDLETKYETKKLSLENDIYEINLSQWKIMERIENHGLKGLILKNDWESTGKIEGQERPQEGYFSSVKMPSEKVSSYQKRTSVTPHQRLHFVDKPYECKECGKAFRVRQQLTFHHRIHTGEKPYECKECGMAFRQTAHLTRHQRLHSGEKLYECKECGEAFICGADLRVHQKMHIGEKPYECKECGKAFRVRGQLTLHQRIHTGEKPYVCKECGKAFRQYAHLTRHQKLNSADRLYECKECGKAFLCGSGLRVHHKLHTGEKPYECKECGKAFRVRQQLTLHQRIHTGEKPYECKECGKTFSRGYHLILHHRIHTGEKPYECKECWKAFSRYSQLISHQSIHIGVKPYDCKECGKAFRLLSQLTQHQSIHIGEKPYKCKECGKAFRLRQKLTLHQSIHTGEKPFECKECRKAFRLNSSLIQHLRIHSGEKPYECKECKKAFRQHSHLTHHLKIHNVKI

SEQ ID NO: 15936 - protein, 636 aa, Homo sapiens
MAPRPPTAAPQESVTFKDVSVDFTQEEWYHVDPAQRSLYRDVMLENYSHLVSLGYQVSKPEVIFKLEQGEEPWISEGEIQRPFYPDWKTRPEVKSSHLQQDVSEVSHCTHDLLHATLEDSWDVSSQLDRQQENWKRHLGSEASTQKKIITPQENFEQNKFGENSRLNTNLVTQLNIPARIRPSECETLGSNLGHNADLLNENNILAKKKPYKCDKCRKAFIHRSSLTKHEKTHKGEGAFPNGTDQGIYPGKKHHECTDCGKTFLWKTQLTEHQRIHTGEKPFECNVCGKAFRHSSSLGQHENAHTGEKPYQCSLCGKAFQRSSSLVQHQRIHTGEKPYRCNLCGRSFRHGTSLTQHEVTHSGEKPFQCKECGKAFSRCSSLVQHERTHTGEKPFECSICGRAFGQSPSLYKHMRIHKRGKPYQSSNYSIDFKHSTSLTQDESTLTEVKSYHCNDCGEDFSHITDFTDHQRIHTAENPYDCEQAFSQQAISHPGEKPYQCNVCGKAFKRSTSFIEHHRIHTGEKPYECNECGEAFSRRSSLTQHERTHTGEKPYECIDCGKAFSQSSSLIQHERTHTGEKPYECNECGRAFRKKTNLHDHQRIHTGEKPYSCKECGKNFSRSSALTKHQRIHTRNKL

SEQ ID NO: 15937 - protein, 570 aa, Homo sapiens
MPGETEEPRPPEQQDQEGGEAAKAAPEEPQQRPPEAVAAAPAGTTSSRVLRGGRDRGRAAAAAAAAAVSRRRKAEYPRRRRSSPSARPPDVPGQQPQAAKSPSPVQGKKSPRLLCIEKVTTDKDPKEEKEEEDDSALPQEVSIAASRPSRGWRSSRTSVSRHRDTENTRSSRSKTGSLQLICKSEPNTDQLDYDVGEEHQSPGGISSEEEEEEEEEMLISEEEIPFKDDPRDETYKPHLERETPKPRRKSGKVKEEKEKKEIKVEVEVEVKEEENEIREDEEPPRKRGRRRKDDKSPRLPKRRKKPPIQYVRCEMEGCGTVLAHPRYLQHHIKYQHLLKKKYVCPHPSCGRLFRLQKQLLRHAKHHTDQRDYICEYCARAFKSSHNLAVHRMIHTGEKPLQCEICGFTCRQKASLNWHMKKHDADSFYQFSCNICGKKFEKKDSVVAHKAKSHPEVLIAEALAANAGALITSTDILGTNPESLTQPSDGQGLPLLPEPLGNSTSGECLLLEAEGMSKSYCSGTERVSLMADGKIFVGSGSSGGTEGLVMNSDILGATTEVLIEDSDSAGP

SEQ ID NO: 15938 - protein, 416 aa, Homo sapiens
MAAILLTTRPKVPVSFEDVSVYFTKTEWKLLDLRQKVLYKRVMLENYSHLVSLGFSFSKPHLISQLERGEGPWVADIPRTWATAGLHIGDRTQSKTSTSTQKHSGRQLPGADPQGGKEGQAARSSVLQRGAQGLGQSSAAGPQGPKGAEKRYLCQQCGKAFSRSSNLIKHRIIHSGEKPYACPECGKLFRRSFALLEHQRIHSGEKPYACPECSKTFTRSSNLIKHQVIHSGERPFACGDCGKLFRRSFALLEHARVHSGERPYACPECGKAFSRSSNLIEHQRTHRGEKPYACGQCAKAFKGVSQLIHHQRSHSGERPFACRECGKAFRGRSGLSQHRRVHSGEKPYECSDCGKAFGRRANLFKHQAVHGARRPAKAETARRLAGPGSTGPGSAVAATSPPRPSTAARPSRPSRR

SEQ ID NO: 15939 - protein, 1006 aa, Homo sapiens
MSRRKQSNPRQIKRSLGDMEAREEVQLVGASHMEQKATAPEAPSPPSADVNSPPPLPPPTSPGGPKELEGQEPEPRPTEEEPGSPWSGPDELEPVVQDGQRRIRARLSLATGLSWGPFHGSVQTRASSPRQAEPSPALTLLLVDEACWLRTLPQALTEAEANTEIHRKDDALWCRVTKPVPAGGLLSVLLTAEPHSTPGHPVKKEPAEPTCPAPAHDLQLLPQQAGMASILATAVINKDVFPCKDCGIWYRSERNLQAHLLYYCASRQGTGSPAAAATDEKPKETYPNERVCPFPQCRKSCPSASSLEIHMRSHSGERPFVCLICLSAFTTKANCERHLKVHTDTLSGVCHSCGFISTTRDILYSHLVTNHMVCQPGSKGEIYSPGAGHPATKLPPDSLGSFQQQHTALQGPLASADLGLAPTPSPGLDRKALAEATNGEARAEPLAQNGGSSEPPAAPRSIKVEAVEEPEAAPILGPGEPGPQAPSRTPSPRSPAPARVKAELSSPTPGSSPVPGELGLAGALFLPQYVFGPDAAPPASEILAKMSELVHSRLQQGAGAGAGGAQTGLFPGAPKGATCFECEITFSNVNNYYVHKRLYCSGRRAPEDAPAARRPKAPPGPARAPPGQPAEPDAPRSSPGPGAREEGAGGAATPEDGAGGRGSEGSQSPGSSVDDAEDDPSRTLCEACNIRFSRHETYTVHKRYYCASRHDPPPRRPAAPPGPPGPAAPPAPSPAAPVRTRRRRKLYELHAAGAPPPPPPGHAPAPESPRPGSGSGSGPGLAPARSPGPAADGPIDLSKKPRRPLPGAPAPALADYHECTACRVSFHSLEAYLAHKKYSCPAAPPPGALGLPAAACPYCPPNGPVRGDLLEHFRLAHGLLLGAPLAGPGVEARTPADRGPSPAPAPAASPQPGSRGPRDGLGPEPQEPPPGPPPSPAAAPEAVPPPPAPPSYSDKGVQTPSKGTPAPLPNGNHRYCRLCNIKFSSLSTFIAHKKYYCSSHAAEHVK

SEQ ID NO: 15940 - protein, 1151 aa, Homo sapiens
MSRRKQSKPRQIKRPLEDAIEDEEEECPSEETDIISKGDFPLEESFSTEFGPENLSCEEVEYFCNKGDDEGIQETAESDGDTQSEKPGQPGVETDDWDGPGELEVFQKDGERKIQSRQQLPVGTTWGPFPGKMDLNNNSLKTKAQVPMVLTAGPKWLLDVTWQGVEDNKNNCIVYSKGGQLWCTTTKAISEGEELIAFVVDFDSRLQAASQMTLTEGMYPARLLDSIQLLPQQAAMASILPTAIVNKDIFPCKSCGIWYRSERNLQAHLMYYCSGRQREAAPVSEENEDSAHQISSLCPFPQCTKSFSNARALEMHLNSHSGVKMEEFLPPGASLKCTVCSYTADSVINFHQHLFSHLTQAAFRCNHCHFGFQTQRELLQHQELHVPSGKLPRESDMEHSPSATEDSLQPATDLLTRSELPQSQKAMQTKDASSDTELDKCEKKTQLFLTNQRPEIQPTTNKQSFSYTKIKSEPSSPRLASSPVQPNIGPSFPVGPFLSQFSFPQDITMVPQASEILAKMSELVHRRLRHGSSSYPPVIYSPLMPKGATCFECNITFNNLDNYLVHKKHYCSSRWQQMAKSPEFPSVSEKMPEALSPNTGQTSINLLNPAAHSADPENPLLQTSCINSSTVLDLIGPNGKGHDKDFSTQTKKLSTSSNNDDKINGKPVDVKNPSVPLVDGESDPNKTTCEACNITFSRHETYMVHKQYYCATRHDPPLKRSASNKVPAMQRTMRTRKRRKMYEMCLPEQEQRPPLVQQRFLDVANLNNPCTSTQEPTEGLGECYHPRCDIFPGIVSKHLETSLTINKCVPVSKCDTTHSSVSCLEMDVPIDLSKKCLSQSERTTTSPKRLLDYHECTVCKISFNKVENYLAHKQNFCPVTAHQRNDLGQLDGKVFPNPESERNSPDVSYERSIIKCEKNGNLKQPSPNGNLFSSHLATLQGLKVFSEAAQLIATKEENRHLFLPQCLYPGAIKKAKGADQLSPYYGIKPSDYISGSLVIHNTDIEQSRNAENESPKGQASSNGCAALKKDSLPLLPKNRGMVIVNGGLKQDERPAANPQQENISQNPQHEDDHKSPSWISENPLAANENVSPGIPSAEEQLSSIAKGVNGSSQAPTSGKYCRLCDIQFNNLSNFITHKKFYCSSHAAEHVK

SEQ ID NO: 15941 - protein, 805 aa, Homo sapiens
MDEDGLELQQEPNSFFDATGADGTHMDGDQIVVEVQETVFVSDVVDSDITVHNFVPDDPDSVVIQDVIEDVVIEDVQCPDIMEEADVSETVIIPEQVLDSDVTEEVSLAHCTVPDDVLASDITSASMSMPEHVLTGDSIHVSDVGHVGHVGHVEHVVHDSVVEAEIVTDPLTTDVVSEEVLVADCASEAVIDANGIPVDQQDDDKGNCEDYLMISLDDAGKIEHDGSSGMTMDTESEIDPCKVDGTCPEVIKVYIFKADPGEDDLGGTVDIVESEPENDHGVELLDQNSSIRVPREKMVYMTVNDSQPEDEDLNVAEIADEVYMEVIVGEEDAAAAAAAAAVHEQQMDDNEIKTFMPIAWAAAYGNNSDGIENRNGTASALLHIDESAGLGRLAKQKPKKRRRPDSRQYQTAIIIGPDGHPLTVYPCMICGKKFKSRGFLKRHMKNHPEHLAKKKYRCTDCDYTTNKKISLHNHLESHKLTSKAEKAIECDECGKHFSHAGALFTHKMVHKEKGANKMHKCKFCEYETAEQGLLNRHLLAVHSKNFPHICVECGKGFRHPSELKKHMRIHTGEKPYQCQYCEYRSADSSNLKTHVKTKHSKEMPFKCDICLLTFSDTKEVQQHALIHQESKTHQCLHCDHKSSNSSDLKRHIISVHTKDYPHKCDMCDKGFHRPSELKKHVAAHKGKKMHQCRHCDFKIADPFVLSRHILSVHTKDLPFRCKRCRKGFRQQSELKKHMKTHSGRKVYQCEYCEYSTTDASGFKRHVISIHTKDYPHRCEYCKKGFRRPSEKNQHIMRHHKEVGLP

SEQ ID NO: 15942 - protein, 801 aa, Homo sapiens
MDEDEFELQPQEPNSFFDGIGADATHMDGDQIVVEIQEAVFVSNIVDSDITVHNFVPDDPDSVVIQDVVEDVVIEEDVQCSDILEEADVSENVIIPEQVLDSDVTEEVSLPHCTVPDDVLASDITSTSMSMPEHVLTSESMHVCDIGHVEHMVHDSVVEAEIITDPLTSDIVSEEVLVADCAPEAVIDASGISVDQQDNDKASCEDYLMISLDDAGKIEHDGSTGVTIDAESEMDPCKVDSTCPEVIKVYIFKADPGEDDLGGTVDIVESEPENDHGVELLDQNSSIRVPREKMVYMTVNDSQQEDEDLNVAEIADEVYMEVIVGEEDAAVAAAAAAVHEQQIDEDEMKTFVPIAWAAAYGNNSDGIENRNGTASALLHIDESAGLGRLAKQKPKKKRRPDSRQYQTAIIIGPDGHPLTVYPCMICGKKFKSRGFLKRHMKNHPEHLAKKKYHCTDCDYTTNKKISLHNHLESHKLTSKAEKAIECDECGKHFSHAGALFTHKMVHKEKGANKMHKCKFCEYETAEQGLLNRHLLAVHSKNFPHICVECGKGFRHPSELRKHMRIHTGEKPYQCQYCEYRSADSSNLKTHIKTKHSKEMPFKCDICLLTFSDTKEVQQHTLVHQESKTHQCLHCDHKSSNSSDLKRHVISVHTKDYPHKCEMCEKGFHRPSELKKHVAVHKGKKMHQCRHCDFKIADPFVLSRHILSVHTKDLPFRCKRCRKGFRQQNELKKHMKTHSGRKVYQCEYCEYSTTDASGFKRHVISIHTKDYPHRCEYCKKGFRRPSEKNQHIMRHHKEVGLP

SEQ ID NO: 15943 - protein, 2539 aa, Homo sapiens [sequence omitted]

SEQ ID NO: 15944 - protein, 271 aa, Homo sapiens
MTEPQVGCVACPRVHKEPAQVGTPWPAKPRSHPRKRDPTALLPRSLWPACQESVTALCFLQETVERLGQSPAQDTPVLGPCWDPMALGTQGRLLLDRDSKDTQTRISQKGRRLQPPGTPSAPPQRRPRKQLNPCRGTERVDPGFEGVTLKFQIKPDSSLQIIPTYSLPCSSRSQESPADAVGGPAAHPGGTEAHSAGSEALEPRRCASCRTQRTPLWRDAEDGTPLCNACGIRYKKYGTRCSSCWLVPRKNVQPKRLCGRCGVSLDPIQEG

SEQ ID NO: 15945 - protein, 531 aa, Homo sapiens
MDEESLESALQTYRAQLQQVELALGAGLDSSEQADLRQLQGDLKELIELTEASLVSVRKSSLLAALDEERPGRQEDAEYQAFREAITEAVEAPAAARGSGSETVPKAEAGPESAAGGQEEEEGEDEEELSGTKVSAPYYSSWGTLEYHNAMVVGTEEAEDGSAGVRVLYLYPTHKSLKPCPFFLEGKCRFKENCRFSHGQVVSLDELRPFQDPDLSSLQAGSACLAKHQDGLWHAARITDVDNGYYTVKFDSLLLREAVVEGDGILPPLRTEATESDSDSDGTGDSSYARVVGSDAVDSAQSSALCPSLAVVGSDAVDSGTCSSAFAGWEVHTRGIGSRLLTKMGYEFGKGLGRHAEGRVEPIHAVVLPRGKSLDQCVETLQKQTRVGKAGTNKPPRCRGRGARPGGRPAPRNVFDFLNEKLQGQAPGALEAGAAPAGRRSKDMYHASKSAKRALSLRLFQTEEKIERTQRDIRSIQEALARNAGRHSVASAQLQEKLAGAQRQLGQLRAQEAGLQQEQRKADTHKKMTEF

SEQ ID NO: 15946 - protein, 873 aa, Homo sapiens
MASRRKSTTPCMVLASEQDPDLELISDLDEGPPVLTPVENTRAESISSDEEVHESVDSDNQQNKKVEGGYECKYCTFQTPDLNMFTFHVDSEHPNVVLNSSYVCVECNFLTKRYDALSEHNLKYHPGEENFKLTMVKRNNQTIFEQTINDLTFDGSFVKEENAEQAESTEVSSSGISISKTPIMKMMKNKVENKRIAVHHNSVEDVPEEKENEIKPDREEIVENPSSSASESNTSTSIVNRIHPSTASTVVTPAAVLPGLAQVITAVSAQQNSNLIPKVLIPVNSIPTYNAALDNNPLLLNTYNKFPYPTMSEITVLSAQAKYTEEQIKIWFSAQRLKHGVSWTPEEVEEARRKQFNGTVHTVPQTITVIPTHISTGSNGLPSILQTCQIVGQPGLVLTQVAGTNTLPVTAPIALTVAGVPSQNNIQKSQVPAAQPTAETKPATAAVPTSQSVKHETALVNPDSFGIRAKKTKEQLAELKVSYLKNQFPHDSEIIRLMKITGLTKGEIKKWFSDTRYNQRNSKSNQCLHLNNDSSTTIIIDSSDETTESPTVGTAQPKQSWNPFPDFTPQKFKEKTAEQLRVLQASFLNSSVLTDEELNRLRAQTKLTRREIDAWFTEKKKSKALKEEKMEIDESNAGSSKEEAGETSPADESGAPKSGSTGKICKKTPEQLHMLKSAFVRTQWPSPEEYDKLAKESGLARTDIVSWFGDTRYAWKNGNLKWYYYYQSANSSSMNGLSSLRKRGRGRPKGRGRGRPRGRPRGSKRINNWDRGPSLIKFKTGTAILKDYYLKHKFLNEQDLDELVNKSHMGYEQVREWFAERQRRSELGIELFEENEEEDEVIDDQEEDEEETDDSDTWEPPRHVKRKLSKSDD

SEQ ID NO: 15947 - protein, 837 aa, Homo sapiens
MASKRKSTTPCMVRTSQVVEQDVPEEVDRAKEKGIGTPQPDVAKDSWAAELENSSKENEVIEVKSMGESQSKKLQGGYECKYCPYSTQNLNEFTEHVDMQHPNVILNPLYVCAECNFTTKKYDSLSDHNSKFHPGEANFKLKLIKRNNQTVLEQSIETTNHVVSITTSGPGTGDSDSGISVSKTPIMKPGKPKADAKKVPKKPEEITPENHVEGTARLVTDTAEILSRLGGVELLQDTLGHVMPSVQLPPNINLVPKVPVPLNTTKYNSALDTNATMINSFNKFPYPTQAELSWLTAASKHPEEHIRIWFATQRLKHGISWSPEEVEEARKKMFNGTIQSVPPTITVLPAQLAPTKVTQPILQTALPCQILGQTSLVLTQVTSGSTTVSCSPITLAVAGVTNHGQKRPLVTPQAAPEPKRPHIAQVPEPPPKVANPPLTPASDRKKTKEQIAHLKASFLQSQFPDDAEVYRLIEVTGLARSEIKKWFSDHRYRCQRGIVHITSESLAKDQLAIAASRHGRTYHAYPDFAPQKFKEKTQGQVKILEDSFLKSSFPTQAELDRLRVETKLSRREIDSWFSERRKLRDSMEQAVLDSMGSGKKGQDVGAPNGALSRLDQLSGAQLTSSLPSPSPAIAKSQEQVHLLRSTFARTQWPTPQEYDQLAAKTGLVRTEIVRWFKENRCLLKTGTVKWMEQYQHQPMADDHGYDAVARKATKPMAESPKNGGDVVPQYYKDPKKLCEEDLEKLVTRVKVGSEPAKDCLPAKPSEATSDRSEGSSRDGQGSDENEESSVVDYVEVTVGEEDAISDRSDSWSQAAAEGVSELAESDSDCVPAEAGQA

SEQ ID NO: 15948 - protein, 956 aa, Homo sapiens
MASKRKSTTPCMIPVKTVVLQDASMEAQPAETLPEGPQQDLPPEASAASSEAAQNPSSTDGSTLANGHRSTLDGYLYSCKYCDFRSHDMTQFVGHMNSEHTDFNKDPTFVCSGCSFLAKTPEGLSLHNATCHSGEASFVWNVAKPDNHVVVEQSIPESTSTPDLAGEPSAEGADGQAEIIITKTPIMKIMKGKAEAKKIHTLKENVPSQPVGEALPKLSTGEMEVREGDHSFINGAVPVSQASASSAKNPHAANGPLIGTVPVLPAGIAQFLSLQQQPPVHAQHHVHQPLPTAKALPKVMIPLSSIPTYNAAMDSNSFLKNSFHKFPYPTKAELCYLTVVTKYPEEQLKIWFTAQRLKQGISWSPEEIEDARKKMFNTVIQSVPQPTITVLNTPLVASAGNVQHLIQAALPGHVVGQPEGTGGGLLVTQPLMANGLQATSSPLPLTVTSVPKQPGVAPINTVCSNTTSAVKVVNAAQSLLTACPSITSQAFLDASIYKNKKSHEQLSALKGSFCRNQFPGQSEVEHLTKVTGLSTREVRKWFSDRRYHCRNLKGSRAMIPGDHSSIIIDSVPEVSFSPSSKVPEVTCIPTTATLATHPSAKRQSWHQTPDFTPTKYKERAPEQLRALESSFAQNPLPLDEELDRLRSETKMTRREIDSWFSERRKKVNAEETKKAEENASQEEEEAAEDEGGEEDLASELRVSGENGSLEMPSSHILAERKVSPIKINLKNLRVTEANGRNEIPGLGACDPEDDESNKLAEQLPGKVSCKKTAQQRHLLRQLFVQTQWPSNQDYDSIMAQTGLPRPEVVRWFGDSRYALKNGQLKWYEDYKRGNFPPGLLVIAPGNRELLQDYYMTHKMLYEEDLQNLCDKTQMSSQQVKQWFAEKMGEETRAVADTGSEDQGPGTGELTAVHKGMGDTYSEVSENSESWEPRVPEASSEPFDTSSPQAGRQLETD

SEQ ID NO: 15949 - protein, 447 aa, Homo sapiens
MLLDAGPQYPAIGVTTFGASRHHSAGDVAERDVGLGINPFADGMGAFKLNPSSHELASAGQTAFTSQAPGYAAAAALGHHHHPGHVGSYSSAAFNSTRDFLFRNRGFGDAAAAASAQHSLFAASAGGFGGPHGHTDAAGHLLFPGLHEQAAGHASPNVVNGQMRLGFSGDMYPRPEQYGQVTSPRSEHYAAPQLHGYGPMNVNMAAHHGAGAFFRYMRQPIKQELICKWIEPEQLANPKKSCNKTFSTMHELVTHVTVEHVGGPEQSNHICFWEECPREGKPFKAKYKLVNHIRVHTGEKPFPCPFPGCGKVFARSENLKIHKRTHTGEKPFKCEFEGCDRRFANSSDRKKHMHVHTSDKPYLCKMCDKSYTHPSSLRKHMKVHESSSQGSQPSPAASSGYESSTPPTIVSPSTDNPTTSSLSPSSSAVHHTAGHSALSSNFNEWYV

SEQ ID NO: 15950 - protein, 532 aa, Homo sapiens
MLLDAGPQFPAIGVGSFARHHHHSAAAAAAAAAEMQDRELSLAAAQNGFVDSAAAHMGAFKLNPGAHELSPGQSSAFTSQGPGAYPGSAAAAAAAAALGPHAAHVGSYSGPPFNSTRDFLFRSRGFGDSAPGGGQHGLFGPGAGGLHHAHSDAQGHLLFPGLPEQHGPHGSQNVLNGQMRLGLPGEVFGRSEQYRQVASPRTDPYSAAQLHNQYGPMNMNMGMNMAAAAAHHHHHHHHHPGAFFRYMRQQCIKQELICKWIDPEQLSNPKKSCNKTFSTMHELVTHVSVEHVGGPEQSNHVCFWEECPREGKPFKAKYKLVNHIRVHTGEKPFPCPFPGCGKVFARSENLKIHKRTHTGEKPFQCEFEGCDRRFANSSDRKKHMHVHTSDKPYLCKMCDKSYTHPSSLRKHMKVHESSPQGSESSPAASSGYESSTPPGLVSPSAEPQSSSNLSPAAAAAAAAAAAAAAAVSAVHRGGGSGSGGAGGGSGGGSGSGGGGGGAGGGGGGSSGGGSGTAGGHSGLSSNFNEWYV

SEQ ID NO: 15951 - protein, 467 aa, Homo sapiens
MTMLLDGGPQFPGLGVGSFGAPRHHEMPNREPAGMGLNPFGDSTHAAAAAAAAAAFKLSPAAAHDLSSGQSSAFTPQGSGYANALGHHHHHHHHHHHTSQVPSYGGAASAAFNSTREFLFRQRSSGLSEAASGGGQHGLFAGSASSLHAPAGIPEPPSYLLFPGLHEQGAGHPSPTGHVDNNQVHLGLRGELFGRADPYRPVASPRTDPYAAGAQFPNYSPMNMNMGVNVAAHHGPGAFFRYMRQPIKQELSCKWIDEAQLSRPKKSCDRTFSTMHELVTHVTMEHVGGPEQNNHVCYWEECPREGKSFKAKYKLVNHIRVHTGEKPFPCPFPGCGKIFARSENLKIHKRTHTGEKPFKCEFEGCDRRFANSSDRKKHMHVHTSDKPYICKVCDKSYTHPSSLRKHMKVHESQGSDSSPAASSGYESSTPPAIASANSKDTTKTPSAVQTSTSHNPGLPPNFNEWYV

SEQ ID NO: 15952 - protein, 334 aa, Homo sapiens; identical to SEQ ID NO: 14398

SEQ ID NO: 15953 - protein, 663 aa, Homo sapiens
MFLKAGRGNKVPPVRVYGPDCVVLMEPPLSKRNPPALRLADLATAQVQPLQNMTGFPALAGPPAHSQLRAAVAHLRLRDLGADPGVATTPLGPEHMAQASTLGLSPPSQAFPAHPEAPAAAARAAALVAHPGAGSYPCGGGSSGAQPSAPPPPAPPLPPTPSPPPPPPPPPPPALSGYTTTNSGGGGSSGKGHSRDFVLRRDLSATAPAAAMHGAPLGGEQRSGTGSPQHPAPPPHSAGMFISASGTYAGPDGSGGPALFPALHDTPGAPGGHPHPLNGQMRLGLAAAAAAAAAELYGRAEPPFAPRSGDAHYGAVAAAAAAALHGYGAVNLNLNLAAAAAAAAAGPGPHLQHHAPPPAPPPPPAPAQHPHQHHPHLPGAAGAFLRYMRQPIKQELICKWIDPDELAGLPPPPPPPPPPPPPPPAGGAKPCSKTFGTMHELVNHVTVEHVGGPEQSSHVCFWEDCPREGKPFKAKYKLINHIRVHTGEKPFPCPFPGCGKVFARSENLKIHKRTHTGEKPFKCEFDGCDRKFANSSDRKKHSHVHTSDKPYYCKIRGCDKSYTHPSSLRKHMKIHCKSPPPSPGPLGYSSVGTPVGAPLSPVLDPARSHSSTLSPQVTNLNEWYVCQASGAPSHLHTPSSNGTTSETEDEEIYGNPEVVRTIH

SEQ ID NO: 15954 - protein, 487 aa, Homo sapiens
MAAAALRAPTQVTVSPETHMDLTKGCVTFEDIAIYFSQDEWGLLDEAQRLLYLEVMLENFALVASLGCGHGTEDEETPSDQNVSVGVSQSKAGSSTQKTQSCEMCVPVLKDILHLADLPGQKPYLVGECTNHHQHQKHHSAKKSLKRDMDRASYVKCCLFCMSLKPFRKWEVGKDLPAMLRLLRSLVFPGGKKPGTITECGEDIRSQKSHYKSGECGKASRHKHTPVYHPRVYTGKKLYECSKCGKAFRGKYSLVQHQRVHTGERPWECNECGKFFSQTSHLNDHRRIHTGERPYECSECGKLFRQNSSLVDHQKIHTGARPYECSQCGKSFSQKATLVKHQRVHTGERPYKCGECGNSFSQSAILNQHRRIHTGAKPYECGQCGKSFSQKATLIKHQRVHTGERPYKCGDCGKSFSQSSILIQHRRIHTGARPYECGQCGKSFSQKSGLIQHQVVHTGERPYECNKCGNSFSQCSSLIHHQKCHNT

SEQ ID NO: 15955 - protein, 527 aa, Homo sapiens
MYQPEDDNNSDVTSDDDMTRNRRESSPPHSVHSFSGDRDWDRRGRSRDMEPRDRWSHTRNPRSRMPPRDLSLPVVAKTSFEMDREDDRDSRAYESRSQDAESYQNVVDLAEDRKPHNTIQDNMENYRKLLSLGFLAQDSVPAEKRNTEMLDNLPSAGSQFPDFKHLGTFLVFEELVTFEDVLVDFSPEELSSLSAAQRNLYREVMLENYRNLVSLGHQFSKPDIISRLEEEESYAMETDSRHTVICQGESHDDPLEPHQGNQEKLLTPITMNDPKTLTPERSYGSDEFERSSNLSKQSKDPLGKDPQEGTAPGICTSPQSASQENKHNRCEFCKRTFSTQVALRRHERIHTGKKPYECKQCAEAFYLMPHLNRHQKTHSGRKTSGCNEGRKPSVQCANLCERVRIHSQEDYFECFQCGKAFLQNVHLLQHLKAHEAARVLPPGLSHSKTYLIRYQRKHDYVGERACQCCDCGRVFSRNSYLIQHYRTHTQERPYQCQLCGKCFGRPSYLTQHYQLHSQEKTVECDHC

SEQ ID NO: 15956 - protein, 472 aa, Homo sapiens
MNNSQGRVTFEDVTVNFTQGEWQRLNPEQRNLYRDVMLENYSNLVSVGQGETTKPDVILRLEQGKEPWLEEEEVLGSGRAEKNGDIGGQIWKPKDVKESLAREVPSINKETLTTQKGVECDGSKKILPLGIDDVSSLQHYVQNNSHDDNGYRKLVGNNPSKFVGQQLKCNACRKLFSSKSRLQSHLRRHACQKPFECHSCGRAFGEKWKLDKHQKTHAEERPYKCENCGNAYKQKSNLFQHQKMHTKEKPYQCKTCGKAFSWKSSCINHEKIHNAKKSYQCNECEKSFRQNSTLIQHKKVHTGQKPFQCTDCGKAFIYKSDLVKHQRIHTGEKPYKCSICEKAFSQKSNVIDHEKIHTGKRAYECDLCGNTFIQKKNLIQHKKIHTGEKPYECNRCGKAFFQKSNLHSHQKTHSGERTYRCSECGKTFIRKLNLSLHKKTHTGQKPYGCSECGKAFADRSYLVRHQKRIHSR

SEQ ID NO: 15957 - protein, 563 aa, Homo sapiens
MMTAESREATGLSPQAAQEKDGIVIVKVEEEDEEDHMWGQDSTLQDTPPPDPEIFRQRFRRFCYQNTFGPREALSRLKELCHQWLRPEINTKEQILELLVLEQFLSILPKELQVWLQEYRPDSGEEAVTLLEDLELDLSGQQVPGQVHGPEMLARGMVPLDPVQESSSFDLHHEATQSHFKHSSRKPRLLQSRALPAAHIPAPPHEGSPRDQAMASALFTADSQAMVKIEDMAVSLILEEWGCQNLARRNLSRDNRQENYGSAFPQGGENRNENEESTSKAETSEDSASRGETTGRSQKEFGEKRDQEGKTGERQQKNPEEKTRKEKRDSGPAIGKDKKTITGERGPREKGKGLGRSFSLSSNFTTPEEVPTGTKSHRCDECGKCFTRSSSLIRHKIIHTGEKPYECSECGKAFSLNSNLVLHQRIHTGEKPHECNECGKAFSHSSNLILHQRIHSGEKPYECNECGKAFSQSSDLTKHQRIHTGEKPYECSECGKAFNRNSYLILHRRIHTREKPYKCTKCGKAFTRSSTLTLHHRIHARERASEYSPASLDAFGAFLKSCV

SEQ ID NO: 15958 - protein, 967 aa, Homo sapiens
MAVALDSQIDAPLEVEGCLIMKVEKDPEWASEPILEGSDSSETFRKCFRQFCYEDVTGPHEAFSKLWELCCRWLKPEMRSKEQILELLVIEQFLTILPEKIQAWAQKQCPQSGEEAVALVVHLEKETGRLRQQVSSPVHREKHSPLGAAWEVADFQPEQVETQPRAVSREEPGSLHSGHQEQLNRKRERRPLPKNARPSPWVPALADEWNTLDQEVTTTRLPAGSQEPVKDVHVARGFSYRKSVHQIPAQRDLYRDFRKENVGNVVSLGSAVSTSNKITRLEQRKEPWTLGLHSSNKRSILRSNYVKEKSVHAIQVPARSAGKTWREQQQWGLEDEKIAGVHWSYEETKTFLAILKESRFYETLQACPRNSQVYGAVAEWLRECGFLRTPEQCRTKFKSLQKSYRKVRNGHMLEPCAFFEDMDALLNPAARAPSTDKPKEMIPVPRLKRIAISAKEHISLVEEEEAAEDSDDDEIGIEFIRKSEIHGAPVLFQNLSGVHWGYEETKTFLDILRETRFYEALQACHRKSKLYGAVAEQLRECGFLRTPEQCRTKFKSLQKSYRKVKNGHVLESCAFYKEMDALINSRASAPSPSTPEEVPSPSRQERGGIEVEPQEPTGWEPEETSQEAVIEDSCSERMSEEEIVQEPEFQGPPGLLQSPNDFEIGSSIKEDPTQIVYKDMEQHRALIEKSKRVVSQSTDPSKYRKRECISGRQWENLQGIRQGKPMSQPRDLGKAVVHQRPFVGKRPYRLLKYGESFGRSTRLMCRMTHHKENPYKCGVCGKCFGRSRSLIRHQRIHTGEKPFKCLDCGKSFNDSSNFGAHQRIHTGEKPYRCGECGKCFSQSSSLIIHQRTHTGEKPYQCGECGKSFTNSSHFSAHRRVHTGENPYKCVDCEKSFNNCTRFREHRRIHTGEKPYGCAQCGKRFSKSSVLTKHREVHVREKPLPHPPSLYCPENPHKGKTDEFRKTF

SEQ ID NO: 15959 - protein, 538 aa, Homo sapiens
MARELSESTALDAQSTEDQMELLVIKVEEEEAGFPSSPDLGSEGSRERFRGFRYPEAAGPREALSRLRELCRQWLQPEMHSKEQILELLVLEQFLTILPGNLQSWVREQHPESGEEVVVLLEYLERQLDEPAPQVSGVDQGQELLCCKMALLTPAPGSQSSQFQLMKALLKHESVGSQPLQDRVLQVPVLAHGGCCREDKVVASRLTPESQGLLKVEDVALTLTPEWTQQDSSQGNLCRDEKQENHGSLVSLGDEKQTKSRDLPPAEELPEKEHGKISCHLREDIAQIPTCAEAGEQEGRLQRKQKNATGGRRHICHECGKSFAQSSGLSKHRRIHTGEKPYECEECGKAFIGSSALVIHQRVHTGEKPYECEECGKAFSHSSDLIKHQRTHTGEKPYECDDCGKTFSQSCSLLEHHRIHTGEKPYQCSMCGKAFRRSSHLLRHQRIHTGDKNVQEPEQGEAWKSRMESQLENVETPMSYKCNECERSFTQNTGLIEHQKIHTGEKPYQCNACGKGFTRISYLVQHQRSHVGKNILSQ

SEQ ID NO: 15960 - protein, 545 aa, Homo sapiens
MAREPRKNAALDAQSAEDQTGLLTVKVEKEEASALTAEVRAPCSPARGPERSRQRFRGFRYPEAAGPREALSRLRELCGQWLQPEMHSKEQILELLVLEQFLTILPGNLQSWVREQHPESGEEVVVLLEYLERQLDEPAPQVPVGDQGQELLCCKMALLTQTQGSQSSQCQPMKALFKHESLGSQPLHDRVLQVPGLAQGGCCREDAMVASRLTPGSQGLLKMEDVALTLTPGWTQLDSSQVNLYRDEKQENHSSLVSLGGEIQTKSRDLPPVKKLPEKEHGKICHLREDIAQIPTHAEAGEQEGRLQRKQKNAIGSRRHYCHECGKSFAQSSGLTKHRRIHTGEKPYECEDCGKTFIGSSALVIHQRVHTGEKPYECEECGKVFSHSSNLIKHQRTHTGEKPYECDDCGKTFSQSCSLLEHHKIHTGEKPYQCNMCGKAFRRNSHLLRHQRIHGDKNVQNPEHGESWESQGRTESQWENTEAPVSYKCNECERSFTRNRSLIEHQKIHTGEKPYQCDTCGKGFTRTSYLVQHQRSHVGKKTLSQ

SEQ ID NO: 15961 - protein, 839 aa, Homo sapiens
MIMTESREVIDLDPPAETSQEQEDLFIVKVEEEDCTWMQEYNPPTFETFYQRFRHFQYHEASGPREALSQLRVLCCEWLRPELHTKEQILELLVLEQFLTILPEEFQPWVREHHPESGEEAVAVIENIQRELEERRQQIVACPDVLPRKMATPGAVQESCSPHPLTVDTQPEQAPQKPRLLEENALPVLQVPSLPLKDSQELTASLLSTGSQKLVKIEEVADVAVSFILEEWGHLDQSQKSLYRDDRKENYGSITSMGYESRDNMELIVKQISDDSESHWVAPEHTERSVPQDPDFAEVSDLKGMVQRWQVNPTVGKSRQNPSQKRDLDAITDISPKQSTHGERGHRCSDCGKFFLQASNFIQHRRIHTGEKPFKCGECGKSYNQRVHLTQHQRVHTGEKPYKCQVCGKAFRVSSHLVQHHSVHSGERPYGCNECGKNFGRHSHLIEHLKRHFREKSQRCSDKRSKNTKLSVKKKISEYSEADMELSGKTQRNVSQVQDFGEGCEFQGKLDRKQGIPMKEILGQPSSKRMNYSEVPYVHKKSSTGERPHKCNECGKSFIQSAHLIQHQRIHTGEKPFRCEECGKSYNQRVHLTQHQRVHTGEKPYTCPLCGKAFRVRSHLVQHQSVHSGERPFKCNECGKGFGRRSHLAGHLRLHSREKSHQCRECGEIFFQYVSLIEHQVLHMGQKNEKNGICEEAYSWNLTVIEDKKIELQEQPYQCDICGKAFGYSSDLIQHYRTHTAEKPYQCDICRENVGQCSHTKQHQKIYSSTKSHQCHECGRGFTLKSHLNQHQRIHTGEKPFQCKECGMNFSWSCSLFKHLRSHERTDPINTLSVEGSLL

SEQ ID NO: 15962 - protein, 754 aa, Homo sapiens
MTTAGRGNLGLIPRSTAFQKQEGRLTVKQEPANQTWGQGSSLQKNYPPVCEIFRLHFRQLCYHEMSGPQEALSRLRELCRWWLMPEVHTKEQILELLVLEQFLSILPGELRTWVQLHHPESGEEAVAVVEDFQRHLSGSEEVSAPAQKQEMHFEETTALGTTKESPPTSPLSGGSAPGAHLEPPYDPGTHHLPSGDFAQCTSPVPTLPQVGNSGDQAGATVLRMVRPQDTVAYEDLSVDYTQKKWKSLTLSQRALQWNMMPENHHSMASLAGENMMKGSELTPKQEFFKGSESSNRTSGGLFGVVPGAAETGDVCEDTFKELEGQTSDEEGSRLENDFLEITDEDKKKSTKDRYDKYKEVGEHPPLSSSPVEHEGVLKGQKSYRCDECGKAFNRSSHLIGHQRIHTGEKPYECNECGKTFRQTSQLIVHLRTHTGEKPYECSECGKAYRHSSHLIQHQRLHNGEKPYKCNECAKAFTQSSRLTDHQRTHTGEKPYECNECGEAFIRSKSLARHQVLHTGKKPYKCNECGRAFCSNRNLIDHQRIHTGEKPYECSECGKAFSRSKCLIRHQSLHTGEKPYKCSECGKAFNQNSQLIEHERIHTGEKPFECSECGKAFGLSKCLIRHQRLHTGEKPYKCNECGKSFNQNSHLIIHQRIHTGEKPYECNECGKVFSYSSSLMVHQRTHTGEKPYKCNDCGKAFSDSSQLIVHQRVHTGEKPYECSECGKAFSQRSTFNHHQRTHTGEKSSGLAWSVS

SEQ ID NO: 15963 - protein, 578 aa, Homo sapiens
MAEESRKPSAPSPPDQTPEEDLVIVKVEEDHGWDQESSLHESNPLGQEVFRLRFRQLRYQETLGPREALIQLRALCHQWLRPDLNTKEQILELLVLEQFLTILPEELQTLVKEHQLENGEEVVTLLEDLERQIDILGRPVSARVHGHRVLWEEVVHSASAPEPPNTQLQSEATQHKSPVPQESQERAMSTSQSPTRSQKGSSGDQEMTATLLTAGFQTLEKIEDMAVSLIREEWLLDPSQKDLCRDNRPENFRNMFSLGGETRSENRELASKQVISTGIQPHGETAAKCNGDVIRGLEHEEARDLLGRLERQRGNPTQERRHKCDECGKSFAQSSGLVRHWRIHTGEKPYQCNVCGKAFSYRSALLSHQDIHNKVKRYHCKECGKAFSQNTGLILHQRIHTGEKPYQCNQCGKAFSQSAGLILHQRIHSGERPYECNECGKAFSHSSHLIGHQRIHTGEKPYECDECGKTFRRSSHLIGHQRSHTGEKPYKCNECGRAFSQKSGLIEHQRIHTGERPYKCKECGKAFNGNTGLIQHLRIHTGEKPYQCNECGKAFIQRSSLIRHQRIHSGEKSESISV

SEQ ID NO: 15964 - protein, 638 aa, Homo sapiens
MESCSVTRLECSGAISAHCSLHLPGSSDSPASASQIAGTTDAIWNEQEKAELFTDKFCQVCGVMLQFESQRISHYEGEKHAQNVSFYFQMHGEQNEVPGKKMKMHVENFQVHRYEGVDKNKFCDLCNMMFSSPLIAQSHYVGKVHAKKLKQLMEEHDQASPSGFQPEMAFSMRTYVCHICSIAFTSLDMFRSHMQGSEHQIKESIVINLVKNSRKTQDSYQNECADYINVQKARGLEAKTCFRKMEESSLETRRYREVVDSRPRHRMFEQRLPFETFRTYAAPYNISQAMEKQLPHSKKTYDSFQDELEDYIKVQKARGLDPKTCFRKMRENSVDTHGYREMVDSGPRSRMCEQRFSHEASQTYQRPYHISPVESQLPQWLPTHSKRTYDSFQDELEDYIKVQKARGLEPKTCFRKIGDSSVETHRNREMVDVRPRHRMLEQKLPCETFQTYSGPYSISQVVENQLPHCLPAHDSKQRLDSISYCQLTRDCFPEKPVPLSLNQQENNSGSYSVESEVYKHLSSENNTADHQAGHKQKHQKRKRHLEEGKERPEKEQSKHKRKKSYEDTDLDKDKSIRQRKREEDRVKVSSGKLKHRKKKKSHDVPSEKEERKHRKEKKKSVEERTEEEMLWDESILGF

SEQ ID NO: 15965 - protein, 199 aa, Homo sapiens
MASGSGTKNLDFRRKWDKDEYEKLAEKRLTEEREKKDGKPVQPVKRELLRHRDYKVDLESKLGKTIVITKTTPQSEMGGYYCNVCDCVVKDSINFLDHINGKKHQRNLGMSMRVERSTLDQVKKRFEVNKKKMEEKQKDYDFEERMKELREEEEKAKAYKKEKQKEKKRRAEEDLTFEEDDEMAAVMGFSGFGSTKKSY

SEQ ID NO: 15966 - protein, 289 aa, Homo sapiens
MILLQHAVLPPPKQPSPSPPMSVATRSTGTLQLPPQKPFGQEASLPLAGEEELSKGGEQDCALEELCKPLYCKLCNVTLNSAQQAQAHYQGKNHGKKLRNYYAANSCPPPARMSNVVEPAATPVVPVPPQMGSFKPGGRVILATENDYCKLCDASFSSPAVAQAHYQGKNHAKRLRLAEAQSNSFSESSELGQRRARKEGNEFKMMPNRRNMYTVQNNSAGPYFNPRSRQRIPRDLAMCVTPSGQFYCSMCNVGAGEEMEFRQHLESKQHKSKVSEQRYRNEMENLGYV

SEQ ID NO: 15967 - protein, 229 aa, Homo sapiens
MKSSDIDQDLFTDSYCKVCSAQLISESQRVAHYESRKHASKVRLYYMLHPRDGGCPAKRLRSENGSDADMVDKNKCCTLCNMSFTSAVVADSHYQGKIHAKRLKLLLGEKTPLKTTATPLSPLKPPRMDTAPVVASPYQRRDSDRYCGLCAAWFNNPLMAQQHYDGKKHKKNAARVALLEQLGTTLDMGELRGLRRNYRCTICSVSLNSIEQYHAHLKGSKHQTNLKNK

SEQ ID NO: 15968 - protein, 170 aa, Homo sapiens
MGKRYFCDYCDRSFQDNLHNRKKHLNGLQHLKAKKVWYDMFRDAAAILLDEQNKRPCRKFLLTGQCDFGSNCRFSHMSERDLQELSIQVEEERRAREWLLDAPELPEGHLEDWLEKRAKRLSSAPSSRAEPIRTTVFQYPVGWPPVQELPPSLRAPPPGGWPLQPRVQWG

SEQ ID NO: 15969 - protein, 573 aa, Homo sapiens
MDAKSLTAWSRTLVTFKDVFVDFTREEWKLLDTAQQIVYRNVMLENYKNLVSLGYQLTKPDVILRLEKGEEPWLVEREIHQETHPDSETAFEIKSSVSSRSIFKDKQSCDIKMEGMARNDLWYLSLEEVWKCRDQLDKYQENPERHLRQVAFTQKKVLTQERVSESGKYGGNCLLPAQLVLREYFHKRDSHTKSLKHDLVLNGHQDSCASNSNECGQTFCQNIHLIQFARTHTGDKSYKCPDNDNSLTHGSSLGISKGIHREKPYECKECGKFFSWRSNLTRHQLIHTGEKPYECKECGKSFSRSSHLIGHQKTHTGEEPYECKECGKSFSWFSHLVTHQRTHTGDKLYTCNQCGKSFVHSSRLIRHQRTHTGEKPYECPECGKSFRQSTHLILHQRTHVRVRPYECNECGKSYSQRSHLVVHHRIHTGLKPFECKDCGKCFSRSSHLYSHQRTHTGEKPYECHDCGKSFSQSSALIVHQRIHTGEKPYECCQCGKAFIRKNDLIKHQRIHVGEETYKCNQCGIIFSQNSPFIVHQIAHTGEQFLTCNQCGTALVNTSNLIGYQTNHIRENAY

SEQ ID NO: 15970 - protein, 542 aa, Homo sapiens
MDDPRYGMCPLKGASGCPGAERSLLVQSYFEKGPLTFRDVAIEFSLEEWQCLDSAQQGLYRKVMLENYRNLVFLAGIALTKPDLITCLEQGKEPWNIKRHEMVAKPPVICSHFPQDLWAEQDIKDSFQEAILKKYGKYGHDNLQLQKGCKSVDECKVHKEHDNKLNQCLITTQSNIFQCDPSAKVFHTFSNSNRHKIRHTRKKPFKCKKCEKSFCMLLHLTQHKRFHITENSYQCKDCGKAFNWFSTLTTHRRIHTGEKPYKCEECGKAFNRSSHLTTHKIIHTGEKPYRCEECGKAFNRSSHLTTHKRIHTGVKPYKCTECGKAFNRSSHLTTHRIIHTGEKPYKCEECGKAFNQSSTLTTHKITHAGEKPYKCEECGKAFYRFSYLTKHKTSHTGEKFYKCEECGKGFNWSSALTKHKRIHTGEKPYKCEECGKAFNESSNLTTHKMIHTGEKPYKCDECGKAFNRSSQLTAHKMIHTGEKPYKCEECGKAFNRSSTLTKHKITHTGEKSYKWEECGKDFNQSLSLIKQNNSYWRETLQM

SEQ ID NO: 15971 - protein, 436 aa, Homo sapiens
MDSVAFEDVAVNFTQEEWALLSPSQKNLYRDVTLETFRNLASVGIQWKDQDIENLYQNLGIKLRSLVERLCGRKEGNEHRETFSQIPDCHLNKKSQTGVKPCKCSVCGKVFLRHSFLDRHMRAHAGHKRSECGGEWRETPRKQKQHGKASISPSSGARRTVTPTRKRPYECKVCGKAFNSPNLFQIHQRTHTGKRSYKCREIVRAFTVSSFFRKHGKMHTGEKRYECKYCGKPIDYPSLFQIHVRTHTGEKPYKCKQCGKAFISAGYLRTHEIRSHALEKSHQCQECGKKLSCSSSLHRHERTHSGGKLYECQKCAKVFRCPTSLQAHERAHTGERPYECNKCGKTFNYPSCFRRHKKTHSGEKPYECTRCGKAFGWCSSLRRHEMTHTGEKPFDCKQCGKVFTFSNYLRLHERTHLAGRSQCFGRRQGDHLSPGV

SEQ ID NO: 15972 - protein, 1883 aa, Homo sapiens
MPVGRIECPSSPSFPRDISHECRVCGVTEVGLSAYAKHISGQLHKDNVDAQEREDDGKGEEEEEDYFDKELIQLIKQRKEQSRQDEPSNSNQEINSDDRRPQWRREDRIPYQDRESYSQPAWHHRGPPQRDWKWEKDGFNNTRKNSFPHSLRNGGGPRGRSGWHKGVAGGSSTWFHNHSNSGGGWLSNSGAVDWNHNGTGRNSSWLSEGTGGFSSWHMNNSNGNWKSSVRSTNNWNYSGPGDKFQPGRNRNSNCQMEDMTMLWNKKSNKSNKYSHDRYNWQRQENDKLGTVATYRGPSEGFTSDKFPSEGLLDFNFEQLESQTTKQADTATSKVSGKNGSAAREKPRRWTPYPSQKTLDLQSGLKDITGNKSEMIEKPLFDFSLITTGIQEPQTDETRNSPTQKTQKEIHTGSLNHKASSDSAASFEVVRQCPTAEKPEQEHTPNKMPSLKSPLLPCPATKSLSQKQDPKNISKNTKTNFFSPGEHSNPSNKPTVEDNHGPYISKLRSSCPHVLKGNKSTFGSQKQSGDNLNDTLRKAKEVLQCHESLQNPLLSTSKSTRNYAKASRNVEESEKGSLKIEFQVHALEDESDGETSDTEKHGTKIGTLGSATTELLSGSTRTADEKEEDDRILKTSRELSTSPCNPIVRQKESELQMTSAASPHPGLLLDLKTSLEDAQVDDSIKSHVSYETEGFESASLDAELQKSDISQPSGPLLPELSKLGFPASLQRDLTRHISLKSKTGVHLPEPNLNSARRIRNISGHRKSETEKESGLKPTLRQILNASRRNVNWEQVIQQVTKKKQELGKGLPRFGIEMVPLVQNEQEALDLDGEPDLSSLEGFQWEGVSISSSPGLARKRSLSESSVIMDRAPSVYSFFSEEGTGKENEPQQMVSPSNSLRAGQSQKATMHLKQEVTPRAASLRTGERAENVATQRRHSAQLSSDHIIPLMHLAKDLNSQERSIPPSENQNSQESNGEGNCLSSSASSALAISSLADAATDSSCTSGAEQNDGQSIRKKRRATGDGSSPELPSLERKNKRRKIKGKKERSQVDQLLNISLREEELSKSLQCMDNNLLQARAALQTAYVEVQRLLMLKQQITMEMSALRTHRIQILQGLQETYEPSEHPDQVPCSLTRERRNSRSQTSIDAALLPTPFFPLFLEPPSSHVSPSPTGASLQITTSPTFQTHGSVPAPDSSVQIKQEPMSPEQDENVNAVPPSSACNVSKELLEANREISDSCPVYPVITARLSLPESTESFHEPSQELKFSVEQRNTRNRENSPSSQSAGLSSINKEGEEPTKGNSGSEACTSSFLRLSFASETPLEKEPHSPADQPEQQAESTLTSAETRGSKKKKKLRKKKSLRAAHVPENSDTEQDVLTVKPVRKVKAGKLIKGGKVTTSTWEDSRTGREQESVRDEPDSDSSLEVLEIPNPQLEVVAIDSSESGEEKPDSPSKKDIWNSTEQNPLETSRSGCDEVSSTSEIGTRYKDGIPVSVAETQTVISSIKGSKNSSEISSEPGDDDEPTEGSFEGHQAAVNAIQIFGNLLYTCSADKTVRVYNLVSRKCIGVFEGHTSKVNCLLVTQTSGKNAALYTGSSDHTIRCYNVKSRECVEQLQLEDRVLCLHSRWRILYAGLANGTVVTFNIKNNKRLEIFECHGPRAVSCLATAQEGARKLLVVGSYDCTISVRDARNGLLLRTLEGHSKTILCMKVVNDLVFSGSSDQSVHAHNIHTGELVRIYKGHNHAVTVVNILGKVMVTACLDKFVRVYELQSHDRLQVYGGHKDMIMCMTIHKSMIYTGCYDGSIQAVRLNLMQNYRCWWHGCSLIFGVVDHLKQHLLTDHTNPNFQTLKCRWKNCDAFFTARKGSKQDAAGHIERHAEDDSKIDS

SEQ ID NO: 15973 - protein, 783 aa, Homo sapiens
MVAKPPVMSFHFAQDLWPEQNIKDSFQKVTLRRYGKCEYENLQLRKGCKHVDECTGHKGGHNTVNQCLTATPSKIFQCNKYVKVFDKFSNSNRYKRRHTGNKHFKCKECSKSFCVLSQLTQHRRIHTRVNSYKCEECGKAFNWFSTLTKHKRIHTGEKPYKCEECGKAFNQSSQLTRHKIIHTEEKPNKCEECGKAFKQASHLTIHKIIHTGEKPYKYEECGKVFSQSSHLTTQKILHTGENLYKCKECGKAFNLFSNLTNHKRIHAGEKPYKCKECGRAFNISSNLNKQEKIHTGGKLNKCEECDKAFNRSLKLTAHKKILMEEKPYKCEECGKVFNQFSTLTRHKIIHTGEKPYKCKECGKAFNQSSNLTEHKKIHTAEKSYKCEECGKAFNQHSNLINHRKIYSGEKPYKCEECGKAFNRSSTLTRHKKIHTGEKPYKCEECDRAFSQSSNLTEHKKIHTGEKPYKCEECGKAFNRFSTLTKHKRIHTGEKPYKCEECGKAFNQSYQLTRHKIVHTKEKLNKCEEFGKAFKQSSHRTIHKIIHTGEKPYKCEEHGKVFNQSSNLTTQKIIHTGENLYKFEEHGKAFNLFSNITNHKIIYTGEKPHKCEECGKAYNRFSNLTIHKRIHTGEKPYQCAECGKAFNCSSTLNRHKIIHTGEKPYKCKECGKAFNLSSTLTAHKKIHTGEKPYKCEECGKAFNQSSNLTTHKKIHTSEKPYKCEECGKSFNQFSSLNIHKIIHTGEKPYKCGDYGRAFNLSSNLTTHKKIHTGEKPYKCEYGKT

SEQ ID NO: 15974 - protein, 913 aa, Homo sapiens
MTKFQEMVTFKDVAVVFTEEELGLLDSVQRKLYRDVMLENFRNLLLVAHQPFKPDLISQLEREEKLLMVETETPRDGCSGRKNQQKMESIQEVTVSYFSPKELSSRQTWQQSAGGLIRCQDFLKVFQGKNSQLQEQGNSLGQVWAGIPVQISEDKNYIFTHIGNGSNYIKSQGYPSWRAHHSWRKMYLKESHNYQCRCQQISMKNHFCKCDSVSWLSHHNDKLEVHRKENYSCHDCGEDIMKVSLLNQESIQTEEKPYPCTGYRKAFSNDSSSEVHQQFHLEGKPYTYSSCGKGCNYSSLLHIHQNIEREDDIENSHLKSYQRVHTEEKPCKCGEYGENFNHCSPLNTYELIHTGEMSYRHNIYEKAFSHSLDLNSIFRVHTRDEPHEYEENENVFNQSSCLQVHQKIHTEEKLYTDIEYGKSFICSSNLDIQHRVHMEENSYNSEECGNGFSLASHFQDLQIVHTKEQPYKRYVCSNSFSHNLYLQGHPKIHIGEKPRKEHGNGFNWSSKLKDHQRVHTGQKPYKCNICGKGFNHRSVLNVHQRVHTGEKPYKCEECDKGFSRSSYLQAHQRVHTGEKPYKCEECGKGFSRNSYLQGHQRVHTGEKPYKCEECGKGFSRSSHLQGHQRVHTGEKPFKCEECGKGFSWSFNLQIHQRVHTGEKPYKCEECGKGFSKASTLLAHQRVHTGEKPYQCDECGKSFSQRSYLQSHQSVHSGERPYICEVCGKGFSQRAYLQGHQRVHTRVKPYKCEMCGKGFSQSSRLEAHRRVHTGGKPYKCEVCTKGFSESSRLQAHQRVHVEGRPYKCEQCGKGFSGYSSLQAHHRVHTGEKPYKCEVCGKGFSQRSNLQAHQRVHTGEKPYKCDACGKGFRWSSGLLIHQRVHSSDKFYKSEDYGKDYPSSENLHRNEDSVLF

SEQ ID NO: 15975 - protein, 417 aa, Homo sapiens
MSQDSVTFADVAVNFTKEEWTLLDPAQRNLYRDVMLENSRNLAFIDWATPCKTKDATPQPDILPKRTFPEANRVCLTSISSQHSTLREDWRCPKTEEPHRQGVNNVKPPAVAPEKDESPVSICEDHEMRNHSKPTCRLVPSQGDSIRQCILTRDSSIFKYNPVLNDSQKTHENNEDDGVLGWNIQWVPCGRKTELKSSTWTGSQNTVHHIRDEIDTGANRHQRNPFGKAFREDGSLRAHNTHGREKMYDFTQCENTSRNNSIHAMQMQLYTAETNKKDCQTGATSANAPNSGSHKSHCTGEKTHKCPECGRAFFYQSFLMRHMKIHTGEKPYECGKCGKAFRYSLHLNKHLRKHVVQKKPYECEECGKVIRESSKYTHIRSHTGEKPYKCKTCGKDFAKSSGLKKHLKTHKDEKPCE

SEQ ID NO: 15976 - protein, 483 aa, Homo sapiens
MKRHEMVAKHLVMFYYFAQHLWPEQNIRDSFQKVTLRRYRKCGYENLQLRKGCKSVVECKQHKGDYSGLNQCLKTTLSKIFQCNKYVEVFHKISNSNRHKMRHTENKHFKCKECRKTFCMLSHLTQHKRIQTRVNFYKCEAYGRAFNWSSTLNKHKRIHTGEKPYKCKECGKAFNQTSHLIRHKRIHTEEKPYKCEECGKAFNQSSTLTTHNIIHTGEIPYKCEKCVRAFNQASKLTEHKLIHTGEKRYECEECGKAFNRSSKLTEHKYIHTGEKLYKCEECGKAFNQSSTLTTHKRIHSGEKPYKCEECGKAFKQFSNLTDHKKIHTGEKPYKCEECGKAFNQLSNLTRHKVIHTGEKPYKCGECGKAFNQSSALNTHKIIHTGENPHKCRESGKVFHLSSKLSTCKKIHTGEKLYKCEECGKAFNRSSTLIGHKRIHTGEKPYKCEECGKAFNQSSTLTTHKIIHTEEKQYKCDECGKAST

SEQ ID NO: 15977 - protein, 697 aa, Homo sapiens
MNKSLGPVSFKDVAVDFTQEEWQQLDPEQKITYRDVMLENYSNLVSVGYHIIKPDVISKLEQGEEPWIVEGEFLLQSYPDEVWQTDDLIERIQEEENKPSRQTVFIETLIEERGNVPGKTFDVETNPVPSRKIAYKNSLCDSCEKCLTSVSEYISSDGSYARMKADECSGCGKSLLHIKLEKTHPGDQAYEFNQNGEPYTLNEESLYQKIRILEKPFEYIECQKAFQKDTVFVNHMEEKPYKWNGSEIAFLQMSDLTVHQTSHMEMKPYECSECGKSFCKKSKFIIHQRTHTGEKPYECNQCGKSFCQKGTLTVHQRTHTGEKPYECNECGKNFYQKLHLIQHQRTHSGEKPYECSYCGKSFCQKTHLTQHQRTHSGERPYVCHDCGKTFSQKSALNDHQKIHTGVKLYKCSECGKCFCRKSTLTTHLRTHTGEKPYECNECGKFFSRLSYLTVHYRTHSGEKPYECNECGKTFYLNSALMRHQRVHTGEKPYECNECGKLFSQLSYLTIHHRTHSGVKPYECSECGKTFYQNSALCRHRRIHKGEKPYECYICGKFFSQMSYLTIHHRIHSGEKPYECSECGKTFCQNSALNRHQRTHTGEKAYECYECGKCFSQMSYLTIHHRIHSGEKPFECNECGKAFSRMSYLTVHYRTHSGEKPYECTECGKKFYHKSAFNSHQRIHRRGNMNVIDVGRLL

SEQ ID NO: 15978 - protein, 390 aa, Homo sapiens
MAEIHNGGELCDFMENGEIFSEHSCLNAHMGTENTGDTYDCDEYGENFPMLHNSAPAGETLSVLNQCRKAFSLPPNVHQRTWIGDKSFEYSDCEEAFVDQSHLQANRITHNGETLYEQKQCGRAFTYSTSHAVSVKMHTVEKPYECKECGKFFRYSSYLNSHMRTHTGEKPYECKECGKCFTVSSHLVEHVRIHTGEKPYQCKECGRAFAGRSGLTKHVRIHTGEKPYECNECGKAYNRFYLLTEHFKTHTEEKPFECKVCGKSFRSSSCLKNHFRIHTGIKPYKCKECGKAFTVSSSLHNHVKIHTGEKPYECKDCGKAFATSSQLIEHIRTHTGEKPYICKECGKTFRASSHLQKHVRIHTGEKPYICNECGKAYNRFYLLTKHLKTH

SEQ ID NO: 15979 - protein, 351 aa, Homo sapiens
MSGHPGSWEMNSVAFEDVAVNFTQEEWALLDPSQKNLYRDVMQETFRNLASIGNKGEDQSIEDQYKNSSRNLRHIISHSGNNPYGCEECGKKPCTCKQCQKTSLSVTRVHRDTVMHTGNGHYGCTICEKVFNIPSSFQIHQRNHTGEKPYECMECGKALGFSRSLNRHKRIHTGEKRYECKQCGKAFSRSSHLRDHERTHTGEKPYECKHCGKAFRYSNCLHYHERTHTGEKPYVCMECGKAFSCLSSLQGHIKAHAGEEPYPCKQCGKAFRYASSLQKHEKTHIAQKPYVCNNCGKGFRCSSSLRDHERTHTGEKPYECQKCGKAFSRASTLWKHKKTHTGEKPYKCKKM

SEQ ID NO: 15980 - protein, 623 aa, Homo sapiens
MEAEETMECLQEFPEHHKMILDRLNEQREQDRFTDITLIVDGHHFKAHKAVLAACSKFFYKFFQEFTQEPLVEIEGVSKMAFRHLIEFTYTAKLMIQGEEEANDVWKAAEFLQMLEAIKALEVRNKENSAPLEENTTGKNEAKKRKIAETSNVITESLPSAESEPVEIEVEIAEGTIEVEDEGIETLEEVASAKQSVKYIQSTGSSDDSALALLADITSKYRQGDRKGQIKEDGCPSDPTSKQVEGIEIVELQLSHVKDLFHCEKCNRSFKLFYHFKEHMKSHSTESFKCEICNKRYLRESAWKQHLNCYHLEEGGVSKKQRTGKKIHVCQYCEKQFDHFGHFKEHLRKHTGEKPFECPNCHERFARNSTLKCHLTACQTGVGAKKGRKKLYECQVCNSVFNSWDQFKDHLVIHTGDKPNHCTLCDLWFMQGNELRRHLSDAHNISERLVTEEVLSVETRVQTEPVTSMTIIEQVGKVHVLPLLQVQVDSAQVTVEQVHPDLLQDSQVHDSHMSELPEQVQVSYLEVGRIQTEEGTEVHVEELHVERVNQMPVEVQTELLEADLDHVTPEIMNQEERESSQADAAEAAREDHEDAEDLETKPTVDSEAEKAENEDRTALPVLE

SEQ ID NO: 15981 - protein, 706 aa, Homo sapiens
MALPSPQVLMGLPALLMGPAQHTSWPCGSAVPTLKSMVTFEDVAVYFSQEEWELLDAAQRHLYHSVMLENLELVTSLGSWHGVEGEGAHPKQNVSVEVLQVRIPNADPSTKKANSCDMCGPFLKDILHLAEHQGTQSEEKPYTCGACGRDFWLNANLHQHQKEHSGGKPFRWYKDRDALMKSSKVHLSENPFTCREGGKVILGSCDLLQLQAVDSGQKPYSNLGQLPEVCTTQKLFECSNCGKAFLKSSTLPNHLRTHSEEIPFTCPTGGNFLEEKSILGNKKFHTGEIPHVCKECGKAFSHSSKLRKHQKFHTEVKYYECIACGKTFNHKLTFVHHQRIHSGERPYECDECGKAFSNRSHLIRHEKVHTGERPFECLKCGRAFSQSSNFLRHQKVHTQVRPYECSQCGKSFSRSSALIQHWRVHTGERPYECSECGRAFNNNSNLAQHQKVHTGERPFECSECGRDFSQSSHLLRHQKVHTGERPFECCDCGKAFSNSSTLIQHQKVHTGQRPYECSECRKSFSRSSSLIQHWRIHTGEKPYECSECGKAFAHSSTLIEHWRVHTKERPYECNECGKFFSQNSILIKHQKVHTGEKPYKCSECGKFFSRKSSLICHWRVHTGERPYECSECGRAFSSNSHLVRHQRVHTQERPYECIQCGKAFSERSTLVRHQKVHTRERTYECSQCGKLFSHLCNLAQHKKIHT

SEQ ID NO: 15982 - protein, 654 aa, Homo sapiens
MAFRDVAVDFTQDEWRLLSPAQRTLYREVMLENYSNLVSLGISFSKPELITQLEQGKETWREEKKCSPATCPADPEPELYLDPFCPPGFSSQKFPMQHVLCNHPPWIFTCLCAEGNIQPGDPGPGDQEKQQQASEGRPWSDQAEGPEGEGAMPLFGRTKKRTLGAFSRPPQRQPVSSRNGLRGVELEASPAQSGNPEETDKLLKRIEVLGFGTVNCGECGLSFSKMTNLLSHQRIHSGEKPYVCGVCEKGFSLKKSLARHQKAHSGEKPIVCRECGRGFNRKSTLIIHERTHSGEKPYMCSECGRGFSQKSNLIIHQRTHSGEKPYVCRECGKGFSQKSAVVRHQRTHLEEKTIVCSDCGLGFSDRSNLISHQRTHSGEKPYACKECGRCFRQRTTLVNHQRTHSKEKPYVCGVCGHSFSQNSTLISHRRTHTGEKPYVCGVCGRGFSLKSHLNRHQNIHSGEKPIVCKDCGRGFSQQSNLIRHQRTHSGEKPMVCGECGRGFSQKSNLVAHQRTHSGERPYVCRECGRGFSHQAGLIRHKRKHSREKPYMCRQCGLGFGNKSALITHKRAHSEEKPCVCRECGQGFLQKSHLTLHQMTHTGEKPYVCKTCGRGFSLKSHLSRHRKTTSVHHRLPVQPDPEPCAGQPSDSLYSL

SEQ ID NO: 15983 - protein, 427 aa, Homo sapiens
MTLVTAGGAWTGPGCWHEVKDEESSSEQSISIAVSHVNTSKAGLPAQTALPCDICGPILKDILHLDEHQGTHHGLKLHTCGACGRQFWFSANLHQYQKCYSIEQPLRRDKSEASIVKNCTVSKEPHPSEKPFTCKEEQKNFQATLGGCQQKAIHSKRKTHRSTESGDAFHGEQMHYKCSECGKAFSRKDTLVQHQRIHSGEKPYECSECGKAFSRKATLVQHQRIHTGERPYECSECGKTFSRKDNLTQHKRIHTGEMPYKCNECGKYFSHHSNLIVHQRVHNGARPYKCSDCGKVFRHKSTLVQHESIHTGENPYDCSDCGKSFGHKYTLIKHQRIHTESKPFECIECGKFFSRSSDYIAHQRVHTGERPFVCSKCGKDFIRTSHLVRHQRVHTGERPYECSECGKAYSLSSHLNRHQKVHTAGRL

SEQ ID NO: 15984 - protein, 658 aa, Homo sapiens
MTPGVRVSTDPEQVTFEDVVVGFSQEEWGQLKPAQRTLYRDVMLDTFRLLVSVGHWLPKPNVISLLEQEAELWAVESRLPQGVYPDLETRPKVKLSVLKQGISEEISNSVILVERFLWDGLWYCRGEDTEGHWEWSCESLESLAVPVAFTPVKTPVLEQWQRNGFGENISLNPDLPHQPMTPERQSPHTWGTRGKREKPDLNVLQKTCVKEKPYKCQECGKAFSHSSALIEHHRTHTGERPYECHECLKGFRNSSALTKHQRIHTGEKPYKCTQCGRTFNQIAPLIQHQRTHTGEKPYECSECGKSFSFRSSFSQHERTHTGEKPYECSECGKAFRQSIHLTQHLRIHTGEKPYQCGECGKAFSHSSSLTKHQRIHTGEKPYECHECGKAFTQITPLIQHQRTHTGEKPYECGECGKAFSQSTLLTEHRRIHTGEKPYGCNECGKTFSHSSSLSQHERTHTGEKPYECSQCGKAFRQSTHLTQHQRIHTGEKPYECNDCGKAFSHSSSLTKHQRIHTGEKPYECNQCGRAFSQLAPLIQHQRIHTGEKPYECNQCGRAFSQSSLLIEHQRIHTKEKPYGCNECGKSFSHSSSLSQHERTHTGEKPYECHDCGKSFRQSTHLTQHRRIHTGEKPYACRDCGKAFTHSSSLTKHQRTHTG

SEQ ID NO: 15985 - protein, 540 aa, Homo sapiens
MDSVAFEDVDVNFTQEEWALLDPSQKNLYRDVMWETMRNLASIGKKWKDQNIKDHYKHRGRNLRSHMLERLYQTKDGSQRGGIFSQFANQNLSKKIPGVKLCESIVYGEVSMGQSSLNRHIKDHSGHEPKEYQEYGEKPDTRNQCWKPFSSHHSFRTHEIIHTGEKLYDCKECGKTFFSLKRIRRHIITHSGYTPYKCKVCGKAFDYPSRFRTHERSHTGEKPYECQECGKAFTCITSVRRHMIKHTGDGPYKCKVCGKPFHSLSSFQVHERIHTGEKPFKCKQCGKAFSCSPTLRIHERTHTGEKPYECKQCGKAFSYLPSLRLHERIHTGEKPFVCKQCGKAFRSASTFQIHERTHTGEKPYECKECGEAFSCIPSMRRHMIKHTGEGPYKCKVCGKPFHSLSPFRIHERTHTGEKPYVCKHCGKAFVSSTSIRIHERTHTGEKPYECKQCGKAFSYLNSFRTHEMIHTGEKPFECKRCGKAFRSSSSFRLHERTHTGQKPYHCKECGKAYSCRASFQRHMLTHAEDGPPYKCMWESL

SEQ ID NO: 15986 - protein, 207 aa, Homo sapiens
MNVARFLVEKHTLHVIIDFILSKVSNQQSNLAQHQRVYTGEKPYKCNEWGKALSGKSSLFYHQAIHGVGKLCKCNDCHKVFSNATTIANHWRIHNEDRSYKCNKCGKIFRHRSYLAVYQRTHTGEKPYKYHDCGKVFSQASSYAKHRRIHTGEKPHKCDDCGKVLTSRSHLIRHQRIHTGQKSYKCLKCGKVFSLWALHAEHQKIHF

SEQ ID NO: 15987 - protein, 262 aa, Homo sapiens
MKRHEMVVAKHSALCSRFAQDLWLEQNIKDSFQKVTLSRYGKYGHKNLQLRKGCKSVDECKGHQGGFNGLNQCLKITTSKIFQCNKYVKVMHKFSNSNRHKIRHTENKHFRCKECDKSLCMLSRLTQHKKIHTRENFYKCEECGKTFNWSTNLSKPKKIHTGEKPYKCEVCGKAFHQSSILTKHKIIRTGEKPYKCAHCGKAFKQSSHLTRHKIIHTEEKPYKCEQCGKVFKQSPTLTKHQIIYTGEEPYKCEECGKAFNLS

SEQ ID NO: 15988 - protein, 642 aa, Homo sapiens
MDSVSFEDVAVNFTLEEWALLDSSQKKLYEDVMQETFKNLVCLGKKWEDQDIEDDHRNQGKNRRCHMVERLCESRRGSKCGETTSQMPNVNINKETFTGAKPHECSFCGRDFIHHSSLNRHMRSHTGQKPNEYQEYEKQPCKCKAVGKTFSYHHCFRKHERTHTGVKPYECKQCGKAFIYYQPFQRHERTHAGQKPYECKQCGKTFIYYQSFQKHAHTGKKPYECKQCGKAFICYQSFQRHKRTHTGEKPYECKQCGKAFSCPTYFRTHERTHTGEKPYKCKECGKAFSFLSSFRRHKRTHSGEKPYECKECGKAFFYSASFRAHVIIHTGARPYKCKECGKAFNSSNSCRVHERTHIGEKPYECKRCGKSFSWSISLRLHERTHTGEKPYECKQCHKTFSFSSSLREHETTHTGEKPYECKQCGKTFSFSSSLQRHERTHNAEKPYECKQCGKAFRCSSYFRIHERSHTGEKPYECKQCGKVFIRSSSFRLHERTHTGEKPYECKLCGKTFSFSSSLREHEKIHTGNKPFECKQCGKAFLRSSQIRLHERTHTGEKPYQCKQCGKAFISSSKFRMHERTHTGEKPYRCKQCGKAFRFSSSVRIHERSHTGEKPYECKQCGKAFISSSHFRLHERTHMGEKV

SEQ ID NO: 15989 - protein, 457 aa, Homo sapiens
MSQGSVTFRDVAIDFSQEEWKWLQPAQRDLYRCVMLENYGHLVSLGLSISKPDVVSLLEQGKEPWLGKREVKRDLFSVSESSGEIKDFSPKNVIYDDSSQYLIMERILSQGPVYSSFKGGWKCKDHTEMLQENQGCIRKVTVSHQEALAQHMNISTVERPYGCHECGKTFGRRFSLVLHQRTHTGEKPYACKECGKTFSQISNLVKHQMIHTGKKPHECKDCNKTFSYLSFLIEHQRTHTGEKPYECTECGKAFSRASNLTRHQRIHIGKKQYICRKCGKAFSSGSELIRHQITHTGEKPYECIECGKAFRRFSHLTRHQSIHTTKTPYECNECRKAFRCHSFLIKHQRIHAGEKLYECDECGKVFTWHASLIQHTKSHTGEKPYACAECDKAFSRSFSLILHQRTHTGEKPYVCKVCNKSFSWSSNLAKHQRTHTLDNPYEYENSFNYHSFLTEHQ

SEQ ID NO: 15990 - protein, 474 aa, Homo sapiens
MELLTFRDVAIEFSPEEWKCLDPDQQNLYRDVMLENYRNLVSLGVAISNPDLVTCLEQRKEPYNVKIHKIVARPPAMCSHFTQDHWPVQGIEDSFHKLILRRYEKCGHDNLQLRKGCKSLNECKLQKGGYNEFNECLSTTQSKILQCKASVKVVSKFSNSNKRKTRHTGEKHFKECGKSFQKFSHLTQHKVIHAGEKPYTCEECGKAFKWSLIFNEHKRIHTGEKPFTCEECGSIFTTSSHFAKHKIIHTGEKPYKCEECGKAFNRFTTLTKHKRIHAGEKPITCEECRKIFTSSSNFAKHKRIHTGEKPYKCEECGKAFNRSTTLTKHKRIHTGEKPYTCEECGKAFRQSSKLNEHKKVHTGERPYKCDECGKAFGRSRVLNEHKKIHTGEKPYKCEECGKAFRRSTDRSQHKKIHSADKPYKCKECDKAFKQFSLLSQHKKIHTVDKPYKCKDCDKAFKRFSHLNKHKKIHT

SEQ ID NO: 15991 - protein, 1687 aa, Homo sapiens
MTDPLLDSQPASSTGEMDGLCPELLLIPPPLSNRGILGPVQSPCPSRDPAPIPTEPGCLLVEATATEEGPGNMEIIVETVAGTLTPGAPGETPAPKLPPGEREPSQEAGTPLPGQETAEEENVEKEEKSDTQKDSQKAVDKGQGAQRLEGDVVSGTESLFKTHMCPECKRCFKKRTHLVEHLHLHFPDPSLQCPNCQKFFTSKSKLKTHLLRELGEKAHHCPLCHYSAVERNALNRHMASMHEDISNFYSDTYACPVCREEFRLSQALKEHLKSHTAAAAAEPLPLRCFQEGCSYAAPDRKAFIKHLKETHGVRAVECRHHSCPMLFATAEAMEAHHKSHYAFHCPHCDFACSNKHLFRKHKKQGHPGSEELRCTFCPFATFNPVAYQDHVGKMHAHEKIHQCPECNFATAHKRVLIRHMLLHTGEKPHKCELCDFTCRDVSYLSKHMLTHSNTKDYMCTECGYVTKWKHYLRVHMRKHAGDLRYQCNQCSYRCHRADQLSSHKLRHQGKSLMCEVCAFACKRKYELQKHMASQHHPGTPAPLYPCHYCSYQSRHKQAVLSHENCKHTRLREFHCALCDYRTFSNTTLLFHKRKAHGYVPGDQAWQLRYASQEPEGAMQGPTPPPDSEPSNQLSARPEGPGHEPGTVVDPSLDQALPEMSEEVNTGRQEGSEAPHGGDLGGSPSPAEVEEGSCTLHLEALGVELESVTEPPLEEVTETAPMEFRPLGLEGPDGLEGPELSSFEGIGTSDLSAEENPLLEKPVSEPSTNPPSLEEAPNNWVGTFKTTPPAETAPLPPLPESESLLKALRRQDKEQAEALVLEGRVQMVVIQGEGRAFRCPHCPFITRREKALNLHSRTGCQGRREPLLCPECGASFKQQRGLSTHLLKKCPVLLRKNKGLPRPDSPIPLQPVLPGTQASEDTESGKPPPASQEAELLLPKDAPLELPREPEETEEPLATVSGSPVPPAGNSLPTEAPKKHCFDPVPPAGNSSPTEAPKKHHLDPVPPAGNSSPTEALKKHRFEQGKFHCNSCPFLCSRLSSITSHVAEGCRGGRGGGGKRGTPQTQPDVSPLSNGDSAPPKNGSTESSSGDGDTVLVQKQKGARFSCPTCPFSCQQERALRTHQIRGCPLEESGELHCSLCPFTAPAATALRLHQKRRHPTAAPARGPRPHLQCGDCGFTCKQSRCMQQHRRLKHEGVKPHQCPFCDFSTTRRYRLEAHQSRHTGIGRIPCSSCPQTFGTNSKLRLHRLRVHDKTPTHFCPLCDYSGYLRHDITRHVNSCHQGTPAFACSQCEAQFSSETALKQHALRRHPEPAQPAPGSPAETTEGPLHCSRCGLLCPSPASLRGHTRKQHPRLECGACQEAFPSRLALDEHRRQQHFSHRCQLCDFAARERVGLVKHYLEQHEETSAAVAASDGDGDAGQPPLHCPFCDFTCRHQLVLDHHVKGHGGTRLYKCTDCAYSTKNRQKITWHSRIHTGEKPYHCHLCPYACADPSRLKYHMRIHKEERKYLCPECGYKCKWVNQLKYHMTKHTGLKPYQCPECEYCTNRADALRVHQETRHREARAFMCEQCGKAFKTRFLLRTHLRKHSEAKPYVCNVCHRAFRWAAGLRHHALTHTDRHPFFCRLCNYKAKQKFQVVKHVRRHHPDQADPNQGVGKDPTTPTVHLHDVQLEDPSPPAPAAPHTGPEG

SEQ ID NO: 15992 - protein, 638 aa, Homo sapiens
MLLAQINRDSQGMTEFPGGGMEAQHVTLCLTEAVTVADGDNLENMEGVSLQAVTLADGSTAYIQHNSKDAKLIDGQVIQLEDGSAAYVQHVPIPKSTGDSLRLEDGQAVQLEDGTTAFIHHTSKDSYDQSALQAVQLEDGTTAYIHHAVQVPQSDTILAIQADGTVAGLHTGDATIDPDTISALEQYAAKVSIDGSESVAGTGMIGENEQEKKMQIVLQGHATRVTAKSQQSGEKAFRCEYDGCGKLYTTAHHLKVHERSHTGDRPYQCEHAGCGKAFATGYGLKSHVRTHTGEKPYRCSEDNCTKSFKTSGDLQKHIRTHTGERPFKCPFEGCGRSFTTSNIRKVHVRTHTGERPYYCTEPGCGRAFASATNYKNHVRIHTGEKPYVCTVPGCDKRFTEYSSLYKHHVVHTHSKPYNCNHCGKTYKQISTLAMHKRTAHNDTEPIEEEQEAFFEPPPGQGEDVLKGSQITYVTGVEGDDVVSTQVATVTQSGLSQQVTLISQDGTQHVNISQADMQAIGNTITMVTQDGTPITVPAHDAVISSAGTHSVAMVTAEGTEGEQVAIVAQDLAAFHTASSEMGHQQHSHHLVTTETRPLTLVATSNGTQIAVQLGEQPSLEEAIRIASRIQQGETPGLDD

SEQ ID NO: 15993 - protein, 292 aa, Homo sapiens
MSHLSQQRIYSGENPFACKVCGKVFSHKSNLTEHEHFHTREKPFECNECGKAFSQKQYVIKHQNTHTGEKLFECNECGKSFSQKENLLTHQKIHTGEKPFECKDCGKAFIQKSNLIRHQRTHTGEKPFVCKECGKTFSGKSNLTEHEKIHIGEKPFKCSECGTAFGQKKYLIKHQNIHTGEKPYECNECGKAFSQRTSLIVHVRIHSGDKPYECNVCGKAFSQSSSLTVHVRSHTGEKPYGCNECGKAFSQFSTLALHLRIHTGKKPYQCSECGKAFSQKSHHIRHQKIHTH

SEQ ID NO: 15994 - protein, 794 aa, Homo sapiens
MNIDDKLEGLFLKCGGIDEMQSSRTMVVMGGVSGQSTVSGELQDSVLQDRSMPHQEILAADEVLQESEMRQQDMISHDELMVHEETVKNDEEQMETHERLPQGLQYALNVPISVKQEITFTDVSEQLMRDKKQIREPVDLQKKKKRKQRSPAKILTINEDGSLGLKTPKSHVCEHCNAAFRTNYHLQRHVFIHTGEKPFQCSQCDMRFIQKYLLQRHEKIHTGEKPFRCDECGMRFIQKYHMERHKRTHSGEKPYQCEYCLQYFSRTDRVLKHKRMCHENHDKKLNRCAIKGGLLTSEEDSGFSTSPKDNSLPKKKRQKTEKKSSGMDKESALDKSDLKKDKNDYLPLYSSSTKVKDEYMVAEYAVEMPHSSVGGSHLEDASGEIHPPKLVLKKINSKRSLKQPLEQNQTISPLSTYEESKVSKYAFELVDKQALLDSEGNADIDQVDNLQEGPSKPVHSSTNYDDAMQFLKKKRYLQAASNNSREYALNVGTIASQPSVTQAAVASVIDESTTASILESQALNVEIKSNHDKNVIPDEVLQTLLDHYSHKANGQHEISFSVADTEVTSSISINSSEVPEVTPSENVGSSSQASSSDKANMLQEYSKFLQQALDRTSQNDAYLNSPSLNFVTDNQTLPNQPAFSSIDKQVYATMPINSFRSGMNSPLRTTPDKSHFGLIVGDSQHSFPFSGDETNHASATSTQDFLDQVTSQKKAEAQPVHQAYQMSSFEQPFRAPYHGSRAGIATQFSTANGQVNLRGPGTSAEFSEFPLVNVNDNRAGMTSSPDATTGQTFG

SEQ ID NO: 15995 - protein, 437 aa, Homo sapiens
MAAATLRTPTQGTVTFEDVAVHFSWEEWGLLDEAQRCLYRDVMLENLALLTSLDVHHQKQHLGEKHFRSNVGRALFVKTCTFHVSGEPSTCREVGKDFLAKLGFLHQQAAHTGEQSNSKSDGGAISHRGKTHYNCGEHTKAFSGKHTLVQQQRTLTTERCYICSECGKSFSKSYSLNDHWRLHTGEKPYECRECGKSFRQSSSLIQHRRVHTAVRPHECDECGKLFSNKSNLIKHRRVHTGERPYECSECGKSFSQRSALLQHRGVHTGERPYECSECGKFFTYHSSLIKHQKVHSGSRPYECSECGKSFSQNSSLIEHHRVHTGERPYKCSECGKSFSQRSALLQHRGVHTGERPYECSECGKFFPYSSSLRKHQRVHTGSRPYECSECGKSFTQNSGLIKHRRVHTGEKPYECTECGKSFSHNSSLIKHQRIHSR

SEQ ID NO: 15996 - protein, 538 aa, Homo sapiens
MTTFKEAVTFKDVAVVFTEEELGLLDPAQRKLYRDVMLENFRNLLSVGHQPFHQDTCHFLREEKFWMMGTATQREGNSGGKIQTELESVPEAGAHEEWSCQQIWEQIAKDLTRSQDSIINNSQFFENGDVPSQVEAGLPTIHTGQKPSQGGKCKQSISDVPIFDLPQQLYSEEKSYTCDECGKSICYISALHVHQRVHVGEKLFMCDVCGKEFSQSSHLQTHQRVHTGEKPFKCEQCGKGFSRRSALNVHRKLHTGEKPYICEACGKAFIHDSQLKEHKRIHTGEKPFKCDICGKTFYFRSRLKSHSMVHTGEKPFRCDTCDKSFHQRSALNRHCMVHTGEKPYRCEQCGKGFIGRLDFYKHQVVHTGEKPYNCKECGKSFRWSSCLLNHQRVHSGEKSFKCEECGKGFYTNSQLSSHQRSHSGEKPYKCEECGKGYVTKFNLDLHQRVHTGERPYNCKECGKNFSRASSILNHKRLHCQKKPFKCEDCGKRLVHRTYRKDQPRDYSGENPSKCEDCGRRYKRRLNLDILLSLFLNDT

SEQ ID NO: 15997 - protein, 506 aa, Homo sapiens
MPANGTSPQRFPALIPGEPGRSFEGSVSFEDVAVDFTRQEWHRLDPAQRTMHKDVMLETYSNLASVGLCVAKPEMIFKLERGEELWILEEESSGHGYSGSLSLLCGNGSVGDNALRHDNDLLHHQKIQTLDQNVEYNGCRKAFHEKTGFVRRKRTPRGDKNFECHECGKAYCRKSNLVEHLRIHTGERPYECGECAKTFSARSYLIAHQKTHTGERPFECNECGKSFGRKSQLILHTRTHTGERPYECTECGKTFSEKATLTIHQRTHTGEKPYECSECGKTFRVKISLTQHHRTHTGEKPYECGECGKNFRAKKSLNQHQRIHTGEKPYECGECGKFFRMKMTLNNHQRTHTGEKPYQCNECGKSFRVHSSLGIHQRIHTGEKPYECNECGNAFYVKARLIEHQRMHSGEKPYECSECGKIFSMKKSLCQHRRTHTGEKPYECSECGNAFYVKVRLIEHQRIHTGERPFECQECGKAFCRKAHLTEHQRTHIGWSWRCTMKKASH

SEQ ID NO: 15998 - protein, 682 aa, Homo sapiens
MPSLRTRREEAEMELSVPGPSPWTPAAQARVRDAPAVTHPGSAACGTPCCSDTELEAICPHYQQPDCDTRTEDKEFLHKEDIHEDLESQAEISENYAGDVSQVPELGDLCDDVSERDWGVPEGRRLPQSLSQEGDFTPAAMGLLRGPLGEKDLDCNGFDSRFSLSPNLMACQEIPTEERPHPYDMGGQSFQHSVDLTGHEGVPTAESPLICNECGKTFQGNPDLIQRQIVHTGEASFMCDDCGKTFSQNSVLKNRHRSHMSEKAYQCSECGKAFRGHSDFSRHQSHHSSERPYMCNECGKAFSQNSSLKKHQKSHMSEKPYECNECGKAFRRSSNLIQHQRIHSGEKPYVCSECGKAFRRSSNLIKHHRTHTGEKPFECGECGKAFSQSAHLRKHQRVHTGEKPYECNDCGKPFSRVSNLIKHHRVHTGEKPYKCSDCGKAFSQSSSLIQHRRIHTGEKPHVCNVCGKAFSYSSVLRKHQIIHTGEKPYRCSVCGKAFSHSSALIQHQGVHTGDKPYACHECGKTFGRSSNLILHQRVHTGEKPYECTECGKTFSQSSTLIQHQRIHNGLKPHECNQCGKAFNRSSNLIHHQKVHTGEKPYTCVECGKGFSQSSHLIQHQIIHTGERPYKCSECGKAFSQRSVLIQHQRIHTGVKPYDCAACGKAFSQRSKLIKHQLIHTRE

SEQ ID NO: 15999 - protein, 818 aa, Homo sapiens
MALTQVRLTFRDVAIEFSQEEWKCLDPAQRILYRDVMLENYWNLVSLGLCHFDMNIISMLEEGKEPWTVKSCVKIARKPRTPECVKGVVTDIPPKCTIKDLLPKEKSSTEAVFHTVVLERHESPDIEDFSFKEPQKNVHDFECQWRDDTGNYKGVLMAQKEGKRDQRDRRDIENKLMNNQLGVSFHSHLPELQLFQGEGKMYECNQVEKSTNNGSSVSPLQQIPSSVQTHRSKKYHELNHFSLLTQRRKANSCGKPYKCNECGKAFTQNSNLTSHRRIHSGEKPYKCSECGKTFTVRSNLTIHQVIHTGEKPYKCHECGKVFRHNSYLATHRRIHTGEKPYKCNECGKAFRGHSNLTTHQLIHTGEKPFKCNECGKLFTQNSHLISHWRIHTGEKPYKCNECGKAFSVRSSLAIHQTIHTGEKPYKCNECGKVFRYNSYLGRHRRVHTGEKPYKCNECGKAFSMHSNLATHQVIHTGTKPFKCNECSKVFTQNSQLANHRRIHTGEKPYKCNECGKAFSVRSSLTTHQAIHSGEKPYKCIECGKSFTQKSHLRSHRGIHSGEKPYKCNECGKVFAQTSQLARHWRVHTGEKPYKCNDCGRAFSDRSSLTFHQAIHTGEKPYKCHECGKVFRHNSYLATHRRIHTGEKPYKCNECGKAFSMHSNLTTHKVIHTGEKPYKCNQCGKVFTQNSHLANHQRTHTGEKPYRCNECGKAFSVRSSLTTHQAIHTGKKPYKCNECGKVFTQNAHLANHRRIHTGEKPYRCTECGKAFRVRSSLTTHMAIHTGEKRYKCNECGKVFRQSSNLASHHRMHTGEKPYK

SEQ ID NO: 16000 - protein, 485 aa, Homo sapiens
MATEPKKAAAQNSPEDEGLLIVKIEEEEFIHGQDTCLQRSELLKQELCRQLFRQFCYQDSPGPREALSRLRELCCQWLKPEIHTKEQILELLVLEQFLTILPGDLQAWVHEHYPESGEEAVTILEDLERGTDEAVLQVQAHEHGQEIFQKKVSPPGPALNVKLQPVETKAHFDSSEPQLLWDCDNESENSRSMPKLEIFEKIESQRIISGRISGYISEASGESQDICKSAGRVKRQWEKESGESQRLSSAQDEGFGKILTHKNTVRGEIISHDGCERRLNLNSNEFTHQKSCKHGTCDQSFKWNSDFINHQIIYAGEKNHQYGKSFKSPKLAKHAAVFSGDKTHQCNECGKAFRHSSKLARHQRIHTGERCYECNECGKSFAESSDLTRHRRIHTGERPFGCKECGRAFNLNSHLIRHQRIHTREKPYECSECGKTFRVSSHLIRHFRIHTGEKPYECSECGRAFSQSSNLSQHQRIHMRENLLM

SEQ ID NO: 16001 - protein, 603 aa, Homo sapiens
MSPGLLTTRKEALMAFRDVAVAFTQKEWKLLSSAQRTLYREVMLENYSHLVSLGIAFSKPKLIEQLEQGDEPWREENEHLLDLCPEPRTEFQPSFPHLVAFSSSQLLRQYALSGHPTQIFPSSSAGGDFQLEAPRCSSEKGESGETEGPDSSLRKRPSRISRTFFSPHQGDPVEWVEGNREGGTDLRLAQRMSLGGSDTMLKGADTSESGAVIRGNYRLGLSKKSSLFSHQKHHVCPECGRGFCQRSDLIKHQRTHTGEKPYLCPECGRRFSQKASLSIHQRKHSGEKPYVCRECGRHFRYTSSLTNHKRIHSGERPFVCQECGRGFRQKIALLLHQRTHLEEKPFVCPECGRGFCQKASLLQHQSSHTGERPFLCLECGRSFRQQSLLLSHQVTHSGEKPYVCAECGHSFRQKVTLIRHQRTHTGEKPYLCPQCGRGFSQKVTLIGHQRTHTGEKPYLCPDCGRGFGQKVTLIRHQRTHTGEKPYLCPKCGRAFGFKSLLTRHQRTHSEEELYVDRVCGQGLGQKSHLISDQRTHSGEKPCICDECGRGFGFKSALIRHQRTHSGEKPYVCRECGRGFSQKSHLHRHRRTKSGHQLLPQEVF

SEQ ID NO: 16002 - protein, 662 aa, Homo sapiens
MNLTEDYMVFEDVAIHFSQEEWGILNDVQRHLHSDVMLENFALLSSVGCWHGAKDEEAPSKQCVSVGVSQVTTLKPALSTQKAQPCETCSSLLKDILHLAEHDGTHPKRTAKLYLHQKEHLREKLTRSDEGRPSFVNDSVHLAKRNLTCMQGGKDFTGDSDLQQQALHSGWKPHRDTHGVEAFQSGQNNYSCTQCGKDFCHQHTLFEHQKIHTEERPYECSECGKLFRYNSDLIKHQRNHTGERPYKCSECGKAFSLKYNVVQHQKIHTGERPYECSECGKAFLRKSHLLQHQRIHTRPRPYVCSECGKAFLTQAHLVGHQKIHTGERPYGCNECGKYFMYSSALIRHQKVHTGERPFYCCECGKFFMDSCTLIIHQRVHTGEKPYECNECGKFFRYRSTLIRHQKVHTGEKPYECSECGKFFMDTSTLIIHQRVHTGEKPYECNKCGKFFRYCFTLNRHQRVHSGERPYECSECGKFFVDSCTLKSHQRVHTGERPFECSICGKSFRCRSTLDTHQRIHTGERPYECSECGKFFRHNSNHIRHRRNHFGERSFECTECGRVFSQNSHLIRHQKVHTRERTYKCSKCGKFFMDSSTLISHERVHTGEKPYECSECGKVFRYNSSLIKHRRIHTGERPYQCSECGRVFNQNSHLIQHQKVHTR

SEQ ID NO: 16003 - protein, 407 aa, Homo sapiens
MAAKMEITLSSNTEASSKQERHIIAKLEEKRGPPLQKNCPDPELCRQSFRRFCYQEVSGPQEALSQLRQLCRQWLQPELHTKEQILELLVMEQFLTILPPEIQARVRHRCPMSSKEIVTLVEDFHRASKKPKQWVAVCMQGQKVLLEKTGSQLGEQELPDFQPQTPRRDLRESSPAEPSQAGAYDRLSPHHWEKSPLLQEPTPKLAGTEAPRMRSDNKENPQQEGAKGAKPCAVSAGRSKGNGLQNPEPRGANMSEPRLSRRQVSSPNAQKPFAHYQRHCRVEYISSPLKSHPLRELKKSKGGKRSLSNRLQHLGHQPTRSAKKPYKCDDCGKSFTWNSELKRHKRVHTGERPYTCGECGNCFGRQSTLKLHQRIHTGEKPYQCGQCGKSFRQSSNLHQHHRLHHGD

SEQ ID NO: 16004 - protein, 711 aa, Homo sapiens
MPADVNLSQKPQVLGPEKQDGSCEASVSFEDVTVDFSREEWQQLDPAQRCLYRDVMLELYSHLFAVGYHIPNPEVIFRMLKEKEPRVEEAEVSHQRCQEREFGLEIPQKEISKKASFQKDMVGEFTRDGSWCSILEELRLDADRTKKDEQNQIQPMSHSAFFNKKTLNTESNCEYKDPGKMIRTRPHLASSQKQPQKCCLFTESLKLNLEVNGQNESNDTEQLDDVVGSGQLFSHSSSDACSKNIHTGETFCKGNQCRKVCGHKQSLKQHQIHTQKKPDGCSECGGSFTQKSHLFAQQRIHSVGNLHECGKCGKAFMPQLKLSVYLTDHTGDIPCICKECGKVFIQRSELLTHQKTHTRKKPYKCHDCGKAFFQMLSLFRHQRTHSREKLYECSECGKGFSQNSTLIIHQKIHTGERQYACSECGKAFTQKSTLSLHQRIHSGQKSYVCIECGQAFIQKAHLIVHQRSHTGEKPYQCHNCGKSFISKSQLDIHHRIHTGEKPYECSDCGKTFTQKSHLNIHQKIHTGERHHVCSECGKAFNQKSILSMHQRIHTGEKPYKCSECGKAFTSKSQFKEHQRIHTGEKPYVCTECGKAFNGRSNFHKHQITHTRERPFVCYKCGKAFVQKSELITHQRTHMGEKPYECLDCGKSFSKKPQLKVHQRIHTGERPYVCSECGKAFNNRSNFNKHQTTHTRDKSYKCSYSVKGFTKQ

SEQ ID NO: 16005 - protein, 549 aa, Homo sapiens
MPVDLGQALGLLPSLAKAEDSQFSESDAALQEELSSPETARQLFRQFRYQVMSGPHETLKQLRKLCFQWLQPEVHTKEQILEILMLEQFLTILPGEIQMWVRKQCPGSGEEAVTLVESLKGDPQRLWQWISIQVLGQDILSEKMESPSCQVGEVEPHLEVVPQELGLENSSSGPGELLSHIVKEESDTEAELALAASQPARLEERLIRDQDLGASLLPAAPQEQWRQLDSTQKEQYWDLMLETYGKMVSGAGISHPKSDLTNSIEFGEELAGIYLHVNEKIPRPTCIGDRQENDKENLNLENHRDQELLHASCQASGEVPSQASLRGFFTEDEPGCFGEGENLPEALQNIQDEGTGEQLSPQERISEKQLGQHLPNPHSGEMSTMWLEEKRETSQKGQPRAPMAQKLPTCRECGKTFYRNSQLIFHQRTHTGETYFQCTICKKAFLRSSDFVKHQRTHTGEKPCKCDYCGKGFSDFSGLRHHEKIHTGEKPYKCPICEKSFIQRSNFNRHQRVHTGEKPYKCSHCGKSFSWSSSLDKHQRSHLGKKPFQ

SEQ ID NO: 16006 - protein, 692 aa, Homo sapiens
MRACAGSTREAGSGAQDLSTLLCLEESMEEQDEKPPEPPKACAQDSFLPQEIIIKVEGEDTGSLTIPSQEGVNFKIVTVDFTREEQGTWNPAQRTLDRDVILENHRDLVSWDLATAVGKKDSTSKQRIFDEEPANGVKIERFTRDDPWLSSCEEVDDCKDQLEKQQEKQEILLQEVAFTQRKAVIHERVCKSDETGEKSGLNSSLFSSPVIPIRNHFHKHVSHAKKWHLNAAVNSHQKINENETLYENNECGKPPQSIHLIQFTRTQTKDKCYGFSDRIQSFCHGTPLHIHEKIHGGGKTFDFKECGQVLNPKISHNEQQRIPFEESQYKCSETSHSSSLTQNMRNNSEEKPFECNQCGKSFSWSSHLVAHQRTHTGEKPYECSECGKSFSRSSHLVSHQRTHTGEKPYRCNQCGKSFSQSYVLVVHQRTHTGEKPYECNQCGKSFRQSYKLIAHQRTHTGEKPYECNQCGKSFIQSYKLIAHQRIHTGEKPYECNQCGKSFSQSYKLVAHQRTHTGEKPFECNQCGKSFSWSSQLVAHQRTHTGEKPYECSECGKSFNRSSHLVMHQRIHTGEKPYECNQCGKSFSQSYVLVVHQRTHTGEKPYECSQCGKSFRQSSCLTQHQRTHTGEKPFECNQCGKTFSLSARLIVHQRTHTGEKPFTCIQCGKAFINSYKLIRHQATHTEEKLYECN

SEQ ID NO: 16007 - protein, 571 aa, Homo sapiens
MPQVTFNDVAIDFTHEEWGWLSSAQRDLYKDVMVQNYENLVSVAGLSVTKPYVITLLEDGKEPWMMEKKLSKGMIPDWESRWENKELSTKKDNYDEDSPQTVIIEKVVKQSYEFSNSKKNLEYIEKLEGKHGSQVDHFRPAILTSRESPTADSVYKYNIFRSTFHSKSTLSEPQKISAEGNSHKYDILKKNLPKKSVIKNEKVNGGKKLLNSNKSGAAFSQGKSLTLPQTCNREKIYTCSECGKAFGKQSILNRHWRIHTGEKPYECRECGKTFSHGSSLTRHLISHSGEKPYKCIECGKAFSHVSSLTNHQSTHTGEKPYECMNCGKSFSRVSHLIEHLRIHTQEKLYECRICGKAFIHRSSLIHHQKIHTGEKPYECRECGKAFCCSSHLTRHQRIHTMEKQYECNKCLKVFSSLSFLVQHQSIHTEEKPFECQKCRKSFNQLESLNMHLRNHIRLKPYECSICGKAFSHRSSLLQHHRIHTGEKPYECIKCGKTFSCSSNLTVHQRIHTGEKPYKCNECGKAFSKGSNLTAHQRVHNGEKPNSVVSVEKPLDYMNHYTCEKSYRRETV

SEQ ID NO: 16008 - protein, 639 aa, Homo sapiens
MTPASASGEDSGSFYSWQKAKREQGLVTFEDVAVDFTQEEWQYLNPPQRTLYRDVMLETYSNLVFVGQQVTKPNLILKLEVEECPAEGKIPFWNFPEVCQVDEQIERQHQDDQDKCLLMQVGFSDKKTIITKSARDCHEFGNILHLSTNLVASIQRPDKHESFGNNMVDNLDLFSRSSAENKYDNGCAKLFFHTEYEKTNPGMKPYGYKECGKGLRRKKGLSLHQRIKNGEKPFECTACRKTFSKKSHLIVHWRTHTGEKPFGCTECGKAFSQKSQLIIHLRTHTGERPFECPECGKAFREKSTVIIHYRTHTGEKPYECNECGKAFTQKSNLIVHQKTHTGEKTYECTKCGESFIQKLDLIIHHSTHTGKKPHECNECKKTFSDKSTLIIHQRTHTGEKPHKCTECGKSFNEKSTLIVHQRTHTGEKPYECDVCGKTFTQKSNLGVHQRTHSGEKPFECNECEKAFSQKSYLMLHQRGHTGEKPYECNECEKAFSQKSYLIIHQRTHTEEKPYKCNECGKAFREKSKLIIHQRIHTGEKPYECPVCWKAFSQKSQLIIHQRTHTGEKPYACTECGKAFREKSTFTVHQRTHTGEKPYKCTECGKAFTQKSNLIVHQRTHAGKKAHGRGHTRKSKFMAH

SEQ ID NO: 16009 - protein, 751 aa, Homo sapiens
MEDLSSPDSTLLQGGHNLLSSASFQEAVTFKDVIVDFTQEEWKQLDPGQRDLFRDVTLENYTHLVSIGLQVSKPDVISQLEQGTEPWIMEPSIPVGTCADWETRLENSVSAPEPDISEEELSPEVIVEKHKRDDSWSSNLLESWEYEGSLERQQANQQTLPKEIKVTEKTIPSWEKGPVNNEFGKSVNVSSNLVTQEPSPEETSTKRSIKQNSNPVKKEKSCKCNECGKAFSYCSALIRHQRTHTGEKPYKCNECEKAFSRSENLINHQRIHTGDKPYKCDQCGKGFIEGPSLTQHQRIHTGEKPYKCDECGKAFSQRTHLVQHQRIHTGEKPYTCNECGKAFSQRGHFMEHQKIHTGEKPFKCDECDKTFTRSTHLTQHQKIHTGEKTYKCNECGKAFNGPSTFIRHHMIHTGEKPYECNECGKAFSQHSNLTQHQKTHTGEKPYDCAECGKSFSYWSSLAQHLKIHTGEKPYKCNECGKAFSYCSSLTQHRRIHTREKPFECSECGKAFSYLSNLNQHQKTHTQEKAYECKECGKAFIRSSSLAKHERIHTGEKPYQCHECGKTFSYGSSLIQHRKIHTGERPYKCNECGRAFNQNIHLTQHKRIHTGAKPYECAECGKAFRHCSSLAQHQKTHTEEKPYQCNKCEKTFSQSSHLTQHQRIHTGEKPYKCNECDKAFSRSTHLTEHQNTHTGEKPYNCNECRKTFSQSTYLIQHQRIHSGEKPFGCNDCGKSFRYRSALNKHQRLHPGI

SEQ ID NO: 16010 - protein, 626 aa, Homo sapiens
MASPSPPPESKGLLTFEDVAVFFTQEEWDYLDPAQRSLYKDVMMENYGNLVSLDVLNRDKDEEPTVKQEIEEIEEEVEPQGVIVTRIKSEIDQDPMGRETFELVGRLDKQRGIFLWEIPRESLTQEQRMFRENTNIIRKRPNSEEKCHKCEECGKGFVRKAHFIQHQRVHTGEKPFQCNECGKSFSRSSFVIEHQRIHTGERPYECNYCGKTFSVSSTLIRHQRIHTGERPYQCNQCKQSFSQRRSLVKHQRIHTGEKPHKCSDCGKAFSWKSHLIEHQRTHTGEKPYHCTKCKKSFSRNSLLVEHQRIHTGERPHKCGECGKAFRLSTYLIQHQKIHTGEKPFLCIECGKSFSRSSFLIEHQRIHTGERPYQCKECGKSFSQLCNLTRHQRIHTGDKPHKCEECGKAFSRSSGLIQHQRIHTREKTYPYNETKESFDPNCSLVIQQEVYPKEKSYKCDECGKTFSVSAHLVQHQRIHTGEKPYLCTVCGKSFSRSSFLIEHQRIHTGERPYLCRQCGKSFSQLCNLIRHQGVHTGNKPHKCDECGKAFSRNSGLIQHQRIHTGEKPYKCEKCDKSFSQQRSLVNHQKIHAEVKTQETHECDACGEAFNCRISLIQHQKLHTAWMQ

SEQ ID NO: 16011 - protein, 458 aa, Homo sapiens
MAAMPLKAQYQEMVTFEDVAVHFTKTEWTGLSPAQRALYRSVMLENFGNLTALGYPVPKPALISLLERGDMAWGLEAQDDPPAERTKNVCKDVETNIDSESTLIQGISEERDGMMSHGQLKSVPQRTDFPETRNVEKHQDIPTVKNIQGKVPRIPCARKPFICEECGKSFSYFSYYARHQRIHTGEKPFECSECGKAFNGNSSLIRHQRIHTGERPYQCEECGRAFNDNANLIRHQRIHSGDRPYYCTECGNSFTSSSEFVIHQRIHTGEKPYECNECGKAFVGNSPLLRHQKIHTGEKPYECNECGKSFGRTSHLSQHQRIHTGEKPYSCKVCGQAFNFHTKLTRHQRIHSEEKPFDCVDCGKAFSAQEQLKRHLRIHTQESSYVCDECGKALTSKRNLHQHQRIHTGEKPYECSKYEKAFGTSSQLGHLEHVYSGEKPVLDICRFGLPEFFTPFYW

SEQ ID NO: 16012 - protein, 629 aa, Homo sapiens
MTLLTFRDVAIEFSLEEWKCLDLAQQNLYRDVMLENYRNLFSVGLTVCKPGLITCLEQRKEPWNVKRQEAADGHPEMGFHHATQACLELLGSSDLPASASQSAGITGVNHRAQPGLNVSVDKFTALCSPGVLQTVKWFLEFRCIFSLAMSSHFTQDLLPEQGIQDAFPKRILRGYGNCGLDNLYLRKDWESLDECKLQKDYNGLNQCSSTTHSKIFQYNKYVKIFDNFSNLHRRNISNTGEKPFKCQECGKSFQMLSFLTEHQKIHTGKKFQKCGECGKTFIQCSHFTEPENIDTGEKPYKCQECNNVIKTCSVLTKNRIYAGGEHYRCEEFGKVFNQCSHLTEHEHGTEEKPCKYEECSSVFISCSSLSNQQMILAGEKLSKCETWYKGFNHSPNPSKHQRNEIGGKPFKCEECDSIFKWFSDLTKHKRIHTGEKPYKCDECGKAYTQSSHLSEHRRIHTGEKPYQCEECGKVFRTCSSLSNHKRTHSEEKPYTCEECGNIFKQLSDLTKHKKTHTGEKPYKCDECGKNFTQSSNLIVHKRIHTGEKPYKCEECGRVFMWFSDITKHKKTHTGEKPYKCDECGKNFTQSSNLIVHKRIHTGEKPYKCEKCGKAFTQFSHLTVHESIHT

SEQ ID NO: 16013 - protein, 1029 aa, Homo sapiens
MTRENVAHNALRQEGLVKGKDDTWKWGTSFQGSSSSVWETSHLHFRQLRYHETSGPQEALSRLRELCRRWLRPEARTKAQILELLVLEQFLSILPGEIRTWVQLHHPGSGEEAVALVEELQKDLDGPAIQVPVLVKDQDTLQKVVSAPGTTLPPVLPGSHIAAEICPHPPTDLVAFNLQDPQHDSPAPEASALSQEENPRNQLMALMLLTAQPQELVMFEEVSVCFTSEEWACLGPIQRALYWDVMLENYGNVTSLEWETMTENEEVTSKPSSSQRADSHKGTSKRLQGSVPQVLDFEEECEWQVLASQWGNETDERADTVKKVSLCERDKKKRTPPEKQGQKWKELGDSLTFGSAISESLIGTEGKKFYKCDMCCKHFNKISHLINHRRIHTGEKPHKCKECGKGFIQRSSLLMHLRNHSGEKPYKCNECGKAFSQSAYLLNHQRIHTGEKPYKCKECGKGFYRHSGLIIHLRRHSGERPYKCNECGKVFSQNAYLIDHQRLHKGEEPYKCNKCQKAFILKKSLILHQRIHSGEKPYKCDECGKTFAQTTYLIDHQRLHSAENPYKCKECGKVFIRSKSLLLHQRVHTEKKTFGCKKCGKIFSSKSNFIDHKRMHSREKPYKCTECGKAFTQSAYLFDHQRLHNGEKPYECNECGKVFILKKSLILHQRFHTGENLYECKDCGKVFGSNRNLIDHERLHNGEKPYECRECGKTFIMSKSFMVHQKLHTQEKAYKCEDCGKAFSYNSSLLVHRRIHTGEKPFECSECGRAFSSNRNLIEHKRIHSGEKPYECDECGKCFILKKSLIGHQRIHTREKSYKCNDCGKVFSYRSNLIAHQRIHTGEKPYACSECGKGFTYNRNLIEHQRIHSGEKTYECHVCRKVLTSSRNLMVHQRIHTGEKPYKCNECGKDFSQNKNLVVHQRMHTGEKPYECDKCRKSFTSKRNLVGHQRIHTGEKPYGCNDCSKVFRQRKNLTVHQKIHTDEKPCECDVSEKEFSQTSNLHLQQKIHTIEEFSWLQNTNESKIEIQKI

SEQ ID NO: 16014 - protein, 426 aa, Homo sapiens
MAAVSPTTRCQESVTFEDVAVVFTDEEWSRLVPIQRDLYKEVMLENYNSIVSLGLPVPQPDVIFQLKRGDKPWMVDLHGSEEREWPESVSLDWETKPEIHDASDKKSEGSLRECLGRQSPLCPKFEVHTPNGRMGTEKQSPSGETRKKSLSRDKGLRRRRSALSREILTKERHQECSDCGKTFFDHSSLTRHQRTHTGEKPYDCRECGKAFSHRSSLSRHLMSHTGESPYECSVCSKAFFDRSSLTVHQRIHTGEKPFQCNECGKAFFDRSSLTRHQRIHTGESPYECHQCGKAFSQKSILTRHQLIHTGRKPYECNECGKAFYGVSSLNRHQKAHAGDPRYQCNECGKAFFDRSSLTQHQKIHTGDKPYECSECGKAFSQRCRLTRHQRVHTGEKPFECTVCGKVFSSKSSVIQHQRRYAKQGID

SEQ ID NO: 16015 - protein, 532 aa, Homo sapiens
MMFQDSVAFEDVAVSFTQEEWALLDPSQKNLYRDVMQETFKNLTSVGKTWKVQNIEDEYKNPRRNLSLMREKLCESKESHHCGESFNQIADDMLNRKTLPGITPCESSVCGEVGTGHSSLNTHIRADTGHKSSEYQEYGENPYRNKECKKAFSYLDSFQSHDKACTKEKPYDGKECTETFISHSCIQRHRVMHSGDGPYKCKFCGKAFYFLNLCLIHERIHTGVKPYKCKQCGKAFTRSTTLPVHERTHTGVNADECKECGNAFSFPSEIRRHKRSHTGEKPYECKQCGKVFISFSSIQYHKMTHTGEKPYECKQCGKAFRCGSHLQKHGRTHTGEKPYECRQCGKAFRCTSDLQRHEKTHTEDKPYGCKQCGKGFRCASQLQIHERTHSGEKPHECKECGKVFKYFSSLRIHERTHTGEKPHECKQCGKAFRYFSSLHIHERTHTGDKPYECKVCGKAFTCSSSIRYHERTHTGEKPYECKHCGKAFISNYIRYHERTHTGEKPYQCKQCGKAFIRASSCREHERTHTINR

SEQ ID NO: 16016 - protein, 390 aa, Homo sapiens; identical to SEQ ID NO: 15978

SEQ ID NO: 16017 - protein, 395 aa, Homo sapiens
MMAAKVVPMPPKPKQSFILRVPPDSKLGQDLLRDATNGPKTIHQLVLEHFLTFLPKPSLVQPSQKVKETLVIMKDVSSSLQNRVHPRPLVKLLPKGVQKEQETVSLYLKANPEELVVFEDLNVFHCQEECVSLDPTQQLTSEKEDDSSVGEMMLLAVNGSNPEGEDPEREPVENEDYREKSSDDDEMDSSLVSQQPPDNQEKERLNTSIPQKRKMRNLLVTIENDTPLEELSKYVDISIIALTRNRRTRRWYTCPLCGKQFNESSYLISHQRTHTGEKPYDCNHCGKSFNHKTNLNKHERIHTGEKPYSCSQCGKNFRQNSHRSRHEGIHIREKIFKCPECGKTFPKNEEFVLHLQSHEAERPYGCKKCGRRFGRLSNCTRHEKTHSACKTRKQK

SEQ ID NO: 16018 - protein, 648 aa, Homo sapiens
MATAVEPEDQDLWEEEGILMVKLEDDFTCRPESVLQRDDPVLETSHQNFRRFRYQEAASPREALIRLRELCHQWLRPERRTKEQILELLVLEQFLTVLPGELQSWVRGQRPESGEEAVTLVEGLQKQPRRPRRWVTVHVHGQEVLSEETVHLGVEPESPNELQDPVQSSTPEQSPEETTQSPDLGAPAEQRPHQEEELQTLQESEVPVPEDPDLPAERSSGDSEMVALLTALSQGLVTFKDVAVCFSQDQWSDLDPTQKEFYGEYVLEEDCGIVVSLSFPIPRPDEISQVREEEPWVPDIQEPQETQEPEILSFTYTGDRSKDEEECLEQEDLSLEDIHRPVLGEPEIHQTPDWEIVFEDNPGRLNERRFGTNISQVNSFVNLRETTPVHPLLGRHHDCSVCGKSFTCNSHLVRHLRTHTGEKPYKCMECGKSYTRSSHLARHQKVHKMNAPYKYPLNRKNLEETSPVTQAERTPSVEKPYRCDDCGKHFRWTSDLVRHQRTHTGEKPFFCTICGKSFSQKSVLTTHQRIHLGGKPYLCGECGEDFSEHRRYLAHRKTHAAEELYLCSECGRCFTHSAAFAKHLRGHASVRPCRCNECGKSFSRRDHLVRHQRTHTGEKPFTCPTCGKSFSRGYHLIRHQRTHSEKTS

SEQ ID NO: 16019 - protein, 554 aa, Homo sapiens
MSADGGGIQDTQDKETPPEVPDRGHPHQEMPSKLGEAVPSGDTQESLHIKMEPEEPHSEGASQEDGAQGAWGWAPLSHGSKEKALFLPGGALPSPRIPVLSREGRTRDRQMAAALLTAWSQMPVTFEDVALYLSREEWGRLDHTQQNFYRDVLQKKNGLSLGFPFSRPFWAPQAHGKGEASGSSRQAGDEKEWRGACTGAVEVGQRVQTSSVAALGNVKPFRTRAGRVQWGVPQCAQEAACGRSSGPAKDSGQPAEPDRTPDAAPPDPSPTEPQEYRVPEKPNEEEKGAPESGEEGLAPDSEVGRKSYRCEQCGKGFSWHSHLVTHRRTHTGEKPYACTDCGKRFGRSSHLIQHQIIHTGEKPYTCPACRKSFSHHSTLIQHQRIHTGEKPYVCDRCAKRFTRRSDLVTHQGTHTGAKPHKCPICAKCFTQSSALVTHQRTHTGVKPYPCPECGKCFSQRSNLIAHNRTHTGEKPYHCLDCGKSFSHSSHLTAHQRTHRGVRPYACPLCGKSFSRRSNLHRHEKIHTTGPKALAMLMLGAAAAGALATPPPAPT

SEQ ID NO: 16020 - protein, 478 aa, Homo sapiens; identical to SEQ ID NO: 14405

SEQ ID NO: 16021 - protein, 1280 aa, Homo sapiens
MGSLTFRDVAIEFSLEEWQCLDTAQQNLYRNVMLENYRNLVFLGIAAFKPDLIIFLEEGKESWNMKRHEMVEESPVICSHFAQDLWPEQGIEDSFQKVILRRYEKCGHENLHLKIGYTNVDECKVHKEGYNKLNQSLTTTQSKVFQRGKYANVFHKCSNSNRHKIRHTGKKHLQCKEYVRSFCMLSHLSQHKRIYTRENSYKCEEGGKAFNWSSTLTYYKSAHTGEKPYRCKECGKAFSKFSILTKHKVIHTGEKSYKCEECGKAFNQSAILTKHKIIHTGEKPNKCEECGKAFSKVSTLTTHKAIHAGEKPYKCKECGKAFSKVSTLITHKAIHAGEKPYKCKECGKAFSKFSILTKHKVIHTGEKPYKCEECGKAYKWPSTLSYHKKIHTGEKPYKCEECGKGFSMFSILTKHEVIHTGEKPYKCEECGKAFNWSSNLMEHKKIHTGETPYKCEECGKGFSMFSILTKHKVIHNGEKPYKCEECDKATHAGEKPYKCEECGKAFNWSSNLMEHKRIHTGEKPYKCEECGKSFSTFSILTKHKVIHTGEKPYKCEECGKAYKWSSTLSYHKKIHTVEKPYKCEECGKAFNQSAILIKHKRIHTGEKPYKCEECGKTFSKVSTLTTHKAIHAGEKPYKCKECGKTFIKVSTLTTHKAIHAGEKPYKCKECGKAFSKFSILTKHKVIHTGEKPYKCEECGKAFNWSSNLMEHKRIHTGEKPYKCEECGKSFSTFSVLTKHKVIHTGEKPYKCEECGKAYKWSSTLSYHKKIHTVEKPYKCEECGKAFNRSAILIKHKRIHTDEKPYKCEECGKTFSKVSTLTTHKAIHAGEKPYKCKECGKAFSKFSILTKHKVIHTGEKPYKCEECGKAYKWPSTLSYHKKIHTGEKPYKCEECGKGFSMFSILTKHEVIHTGEKPYKCEECGKAFSWLSVFSKHKKTHAGEKFYKCEACGKAYKSSSTLSYHKKIHTEEKPYKYEECGKGFSTFSILTKHKVIHTGEKPYKCEECGKAFNWSSNLMEHKKIHTGETPYKCEECDKAFSWPSSLTEHKATHAGEKPYKCEECGKAFSWPSRLTEHKATHAGEEPYKCEECGKAFNWSSNLMEHKRIHTGEKPYKCEECGKSFSTFSILTKHKVIHTGEKPYKCEECGKAYKWSSTLSYHKKIHTVEKPYKCEECGKGFVMFSILAKHKVIHTGEKLYKCEECGKAYKWPSTLRYHKKIHTGEKPYKCEECGKAFSTFSILTKHKVIHTGEKPYKCEECGKAFSWLSVFSKHKKIHTGEKL

SEQ ID NO: 16022 - protein, 564 aa, Homo sapiens
MLGFPPGRPQLPVQLRPQTRMATALRDPASGSVTFEDVAVYFSWEEWDLLDEAQKHLYFDVMLENFALTSSLGCWCGVEHEETPSEQRISGERVPQFRTSKEGSSSQNADSCEICCLVLRDILHLAEHQGTNCGQKLHTCGKQFYISANLQQHQRQHITEAPFRSYVDTASFTQSCIVHVSEKPFTCREIRKDFLANMRFLHQDATQTGEKPNNSNKCAVAFYSGKSHHNWGKCSKAFSHIDTLVQDQRILTREGLFECSKCGKACTRRCNLIQHQKVHSEERPYECNECGKFFTYYSSFIIHQRVHTGERPYACPECGKSFSQIYSLNSHRKVHTGERPYECGECGKSFSQRSNLMQHRRVHTGERPYECSECGKSFSQNFSLIYHQRVHTGERPHECNECGKSFSRSSSLIHHRRLHTGERPYECSKCGKSFKQSSSFSSHRKVHTGERPYVCGECGKSFSHSSNLKNHQRVHTGERPVECSECSKSFSCKSNLIKHLRVHTGERPYECSECGKSFSQSSSLIQHRRVHTGKRPYQCSQCGKSFGCKSVLIQHQRVHIGEKP

SEQ ID NO: 16023 - protein, 495 aa, Homo sapiens
MAESAPARHRRKRRSTPLTSSTLPSQATEKSSYFQTTEISLWTVVAAIQAVEKKMESQAARLQSLEGRTGTAEKKLADCEKMAVEFGNQLEGKWAVLGTLLQEYGLLQRRLENVENLLRNRNFWILRLPPGSKGEAPKVSRSLENDGVCFTEQEWENLEDWQKELYRNVMESNYETLVSLKVLGQTEGEAELGTEMLGDLEEEGPGGAHPAGGVMIKQELQYTQEGPADLPGEFSCIAEEQAFLSPEQTELWGGQGSSVLLETGPGDSTLEEPVGSRVPSSSRTVGCPKQKSHRQVQLDQECGQGLKLKKDTSRPYECSECEITFRYKQQLATHLRSHSGWGSCTPEEPEESLRPRPRLKPQTKKAKLHQCDVCLRSFSCKVSLVTHQRCHLQEGPSAGQHVQERFSPNSLVALPGHIPWRKSRSSLICGYCGKSFSHPSDLVRHQRIHTGERPYSCTECEKSFVQKQHLLQHQKIHQRERGGLALEPGRPNGLL

SEQ ID NO: 16024 - protein, 459 aa, Homo sapiens
MAAPLEAQDQAPGEGEGLLIVKVEDSSWEQESAQHEDGRDSEACRQRFRQFCYGDVHGPHEAFSQLWELCCRWLRPELRTKEQILELLVLEQFLTVLPGEIQGWVREQHPGSGEEAVALVEDLQKQPVKAWRQDVPSEEAEPEAAGRGSQATGPPPTVGARRRPSVPQEQHSHSAQPPALLKEGRPGETTDTCFVSGVHGPVALGDIPFYFSREEWGTLDPAQRDLFWDIKRENSRNTTLGFGLKGQSEKSLLQEMVPVVPGQTGSDVTVSWSPEEAEAWESENRPRAALGPVVGARRGRPPTRRRQFRDLAAEKPHSCGQCGKRFRWGSDLARHQRTHTGEKPHKCPECDKSFRSSSDLVRHQGVHTGEKPFSCSECGKSFSRSAYLADHQRIHTGEKPFGCSDCGKSFSLRSYLLDHRRVHTGERPFGCGECDKSFKQRAHLIAHQSLHAKMAQPVG

SEQ ID NO: 16025 - protein, 606 aa, Homo sapiens
MAVTFEDVTIIFTWEEWKFLDSSQKRLYREVMWENYTNVMSVENWNESYKSQEEKFRYLEYENFSYWQGWWNAGAQMYENQNYGETVQGTDSKDLTQQDRSQCQEWLILSTQVPGYGNYELTFESKSLRNLKYKNFMPWQSLETKTTQDYGREIYMSGSHGFQGGRYRLGISRKNLSMEKEQKLIVQHSYIPVEEALPQYVGVICQEDLLRDSMEEKYCGCNKCKGIYYWNSRCVFHKRNQPGENLCQCSICKACFSQRSDLYRHPRNHIGKKLYGCDEVDGNFHQSSGVHFHQRVHIGEVPYSCNACGKSFSQISSLHNHQRVHTEEKFYKIECDKDLSRNSLLHIHQRLHIGEKPFKCNQCGKSFNRSSVLHVHQRVHTGEKPYKCDECGKGFSQSSNLRIHQLVHTGEKSYKCEDCGKGFTQRSNLQIHQRVHTGEKPYKCDDCGKDFSHSSDLRIHQRVHTGEKPYTCPECGKGFSKSSKLHTHQRVHTGEKPYKCEECGKGFSQRSHLLIHQRVHTGEKPYKCHDCGKGFSHSSNLHIHQRVHTGEKPYQCAKCGKGFSHSSALRIHQRVHAGEKPYKCREYYKGFDHNSHLHNNHRRGNL

SEQ ID NO: 16026 - protein, 517 aa, Homo sapiens
MQPLSKLMAISKPRNLSLREQREVLRADMSWQQETNPVVETHDSEASRQKFRHFQYLKVSGPHEALSQLWELCLQWLRPEIHTKKQIIELLVLEQFLAILPEEVRTWVNLQHPNNSKDMVTLIEDVIEMLEDEDMPCKDSALQMGSIKEKMKAGSRTGKPQEPVTFKDVVVEFSKEEWGQLDSAVKNLYRNVMLENFRNLNSLRKAHLLSKPFESLKLESKKKRWIMEKEIPRKTIFDMKSISGEESSHGVIMTRLTESGHPSSDAWKGENWLYRNQKKWDINLPQEAFIPETIYTEEEDFECSENKKSFDINSVSSICAIQVGIPSRKGSPKCDKFKTYFKFNLDSVGKQHSEYEYGNDLSLSTDIRHQKSHTTMNSYECYQCGKAFCRSSSLIRHQIIHTGEKPYKCSECGRFFNRRTNLTKHQKLHAEAKACTSNKCGKAFSKSEDSNNPTLHFGNNFYQCVNCGKSFNRSSSLIRHQMIHTGEKPFKCKECSKAFNRSSNLVKHQKLHTRDKS

SEQ ID NO: 16027 - protein, 1048 aa, Homo sapiens
MQSKVTGNMPTQSLLMYMDGPEVIGSSLGSPMEMEDALSMKGTAVVPFRATQEKNVIQIEGYMPLDCMFCSQTFTHSEDLNKHVLMQHRPTLCEPAVLRVEAEYLSPLDKSQVRTEPPKEKNCKENEFSCEVCGQTFRVAFDVEIHMRTHKDSFTYGCNMCGRRFKEPWFLKNHMRTHNGKSGARSKLQQGLESSPATINEVVQVHAAESISSPYKICMVCGFLFPNKESLIEHRKVHTKKTAFGTSSAQTDSPQGGMPSSREDFLQLFNLRPKSHPETGKKPVRCIPQLDPFTTFQAWQLATKGKVAICQEVKESGQEGSTDNDDSSSEKELGETNKGSCAGLSQEKEKCKHSHGEAPSVDADPKLPSSKEKPTHCSECGKAFRTYHQLVLHSRVHKKDRRAGAESPTMSVDGRQPGTCSPDLAAPLDENGAVDRGEGGSEDGSEDGLPEGIHLDKNDDGGKIKHLTSSRECSYCGKFFRSNYYLNIHLRTHTGEKPYKCEFCEYAAAQKTSLRYHLERHHKEKQTDVAAEVKNDGKNQDTEDALLTADSAQTKNLKRFFDGAKDVTGSPPAKQLKEMPSVFQNVLGSAVLSPAHKDTQDFHKNAADDSADKVNKNPTPAYLDLLKKRSAVETQANNLICRTKADVTPPPDGSTTHNLEVSPKEKQTETAADCRYRPSVDCHEKPLNLSVGALHNCPAISLSKSLIPSITCPFCTFKTFYPEVLMMHQRLEHKYNPDVHKNCRNKSLLRSRRTGCPPALLGKDVPPLSSFCKPKPKSAFPAQSKSLPSAKGKQSPPGPGKAPLTSGIDSSTLAPSNLKSHRPQQNVGVQGAATRQQQSEMFPKTSVSPAPDKTKRPETKLKPLPVAPSQPTLGSSNINGSIDYPAKNDSPWAPPGRDYFCNRSASNTAAEFGEPLPKRLKSSVVALDVDQPGANYRRGYDLPKYHMVRGITSLLPQDCVYPSQALPPKPRFLSSSEVDSPNVLTVQKPYGGSGPLYTCVPAGSPASSSTLEGKRPVSYQHLSNSMAQKRNYENFIGNAHYRPNDKKT

SEQ ID NO: 16028 - protein, 722 aa, Homo sapiens
MEGSRPRAPSGHLAPSPPAFDGELDLQRYSNGPAVSAGSLGMGAVSWSESRAGERRFPCPVCGKRFRFNSILALHLRAHPGAQAFQCPHCGHRAAQRALLRSHLRTHQPERPRSPAARLLLELEERALLREARLGRARSSGGMQATPATEGLARPQAPSSSAFRCPYCKGKFRTSAERERHLHILHRPWKCGLCSFGSSQEEELLHHSLTAHGAPERPLAATSAAPPPQPQPQPPPQPEPRSVPQPEPEPEPEREATPTPAPAAPEEPPAPPEFRCQVCGQSFTQSWFLKGHMRKHKASFDHACPVCGRCFKEPWFLKNHMKVHASKLGPLRAPGPASGPARAPQPPDLGLLAYEPLGPALLLAPAPTPAERREPPSLLGYLSLRAGEGRPNGEGAEPGPGRSFGGFRPLSSALPARARRHRAEEPEEEEEVVEAEEETWARGRSLGSLASLHPRPGEGPGHSASAAGAQARSTATQEENGLLVGGTRPEGGRGATGKDCPFCGKSFRSAHHLKVHLRVHTGERPYKCPHCDYAGTQSGSLKYHLQRHHREQRSGAGPGPPPEPPPPSQRGSAPQSGAKPSPQPATWVEGASSPRPPSSGAGPGSRRKPASPGRTLRNGRGGEAEPLDLSLRAGPGGEAGPGGALHRCLFCPFATGAPELMALHLQVHHSRRARGRRPPQADASPPYARVPSGETPPSPSQEGEEGSGLSRPGEAGLGGQER

SEQ ID NO: 16029 - protein, 224 aa, Homo sapiens
MRLAKPKAGISRSSSQGKAYENKRKTGRQRQKWGMTIRFDSSFSRLRRSLDDKPYKCTECEKSFSQSSTLFQHQKIHTGKKSHKCADCGKSFFQSSNLIQHRRIHTGEKPYKCDECGESFKQSSNLIQHQRIHTGEKPYQCDECGRCFSQSSHLIQHQRTHTGEKPYQCSECGKCFSQSSHLRQHMKVHKEEKPRKTRGKNIRVKTHLPSWKAGTGRKSVAGLR

SEQ ID NO: 16030 - protein, 617 aa, Homo sapiens
MISPSLELLHSGLCKFPEVEGKMTTFKEAVTFKDVAVVFTEEELGLLDPAQRKLYRDVMLENFRNLLSVGNQPFHQDTFHFLGKEKFWKMKTTSQREGNSGGKIQIEMETVPEAGPHEEWSCQQIWEQIASDLTRSQNSIRNSSQFFKEGDVPCQIEARLSISHVQQKPYRCNECKQSFSDVSVFDLHQQSHSGEKSHTCGECGKSFCYSPALHIHQRVHMGEKCYKCDVCGKEFNQSSHLQTHQRVHTGEKPFKCGQCGKGFHSRSALNVHCKLHTGEKPYNCEECGKAFIHDSQLQEHQRIHTGEKPFKCDICGKSFRVRSRLNRHSMVHTGEKPFRCDTCGKNFRQRSALNSHSMVHIEEKPYKCEQCGKGFICRRDFCKHQMVHTGEKPYNCKECGKTFRWSSCLLNHQQVHSGQKSFKCEECGKGFYTNSRRSSHQRSHNGEKPYNCEECGKDYKRRLDLEFHQRVHTGERPYNCKECGKSFGWASCLLKHQRLHSGEKPFKCEECGKRFTQSSQLHSHQTCHTGEKLYKCEQCEKGYNSKFNLDMHQRVHGGERPYNCKECGKSFGWASCLLKHQRLHSGEKPLKSGVWEEIYSEFTASFTSVSLCGRKAI

SEQ ID NO: 16031 - protein, 482 aa, Homo sapiens
MTMSKEAVTFKDVAVVFTEEELGLLDLAQRKLYRDVMLENFRNLLSVGHQPFHRDTFHFLREEKFWMMDIATQREGNSGGKIQPEMKTFPEAGPHEGWSCQQIWEEIASDLTRPQDSTIKSSQFFEQGDAHSQVEEGLSIMHTGQKPSNCGKCKQSFSDMSIFDLPQQIRSAEKSHSCDECGKSFCYISALHIHQRVHLGEKLFKCDVCGKEFSQSLHLQTHQRVHTGEKPFKCEQCGRGFRCRSALTVHCKLHMGEKHYNCEACGRAFIHDFQLQKHQRIHTGEKPFKCEICSVSFRLRSSLNRHCVVHTGKKPNSTGEYGKGFIRRLDLCKHQTIHTGEKPYNCKECGKSFRRSSYLLIHQRVHTGEKPYKCDKCGKSYITKSGLDLHHRAHTGERPYNCDDCGKSFRQASSILNHKRLHCRKKPFKCEDCGKKLVYRSYRKDQQKNHSGENPSKCEDCGKRYKRRLNLDIILSLFLNDT

SEQ ID NO: 16032 - protein, 707 aa, Homo sapiens
MTTFKEAMTFKDVAVVFTEEELGLLDLAQRKLYRDVMLENFRNLLSVGHQAFHRDTFHFLREEKIWMMKTAIQREGNSGDKIQTEMETVSEAGTHQEWSFQQIWEKIASDLTRSQDLMINSSQFSKEGDFPCQTEAGLSVIHTRQKSSQGNGYKPSFSDVSHFDFHQQLHSGEKSHTCDECGKNFCYISALRIHQRVHMGEKCYKCDVCGKEFSQSSHLQTHQRVHTGEKPFKCVECGKGFSRRSALNVHHKLHTGEKPYNCEECGKAFIHDSQLQEHQRIHTGEKPFKCDICGKSFCGRSRLNRHSMVHTAEKPFRCDTCDKSFRQRSALNSHRMIHTGEKPYKCEECGKGFICRRDLYTHHMVHTGEKPYNCKECGKSFRWASCLLKHQRVHSGEKPFKCEECGKGFYTNSQCYSHQRSHSGEKPYKCVECGKGYKRRLDLDFHQRVHTGEKLYNCKECGKSFSRAPCLLKHERLHSGEKPFQCEECGKRFTQNSHLHSHQRVHTGEKPYKCEKCGKGYNSKFNLDMHQKVHTGERPYNCKECGKSFGWASCLLKHQRLHSGEKPFKCEECGKRFTQNSQLHSHQRVHTGEKPYKCDECGKGFSWSSTRLTHQRRHSRETPLKCEQHGKNIVQNSFSKVQEKVHSVEKPYKCEDCGKGYNRRLNLDMHQRVHMGEKTWKCRECDMCFSQASSLRLHQNVHVGEKP

SEQ ID NO: 16033 - protein, 543 aa, Homo sapiens
MAAAKAEMQLMSPLQISDPFGSFPHSPTMDNYPKLEEMMLLSNGAPQFLGAAGAPEGSGSNSSSSSSGGGGGGGGGSNSSSSSSTFNPQADTGEQPYEHLTAESFPDISLNNEKVLVETSYPSQTTRLPPITYTGRFSLEPAPNSGNTLWPEPLFSLVSGLVSMTNPPASSSSAPSPAASSASASQSPPLSCAVPSNDSSPIYSAAPTFPTPNTDIFPEPQSQAFPGSAGTALQYPPPAYPAAKGGFQVPMIPDYLFPQQQGDLGLGTPDQKPFQGLESRTQQPSLTPLSTIKAFATQSGSQDLKALNTSYQSQLIKPSRMRKYPNRPSKTPPHERPYACPVESCDRRFSRSDELTRHIRIHTGQKPFQCRICMRNFSRSDHLTTHIRTHTGEKPFACDICGRKFARSDERKRHTKIHLRQKDKKADKSVVASSATSSLSSYPSPVATSYPSPVTTSYPSPATTSYPSPVPTSFSSPGSSTYPSPVHSGFPSPSVATTYSSVPPAFPAQVSSFPSSAVTNSFSASTGLSDMTATFSPRTIEIC

SEQ ID NO: 16034 - protein, 706 aa, Homo sapiens; identical to SEQ ID NO: 14917

SEQ ID NO: 16035 - protein, 803 aa, Homo sapiens
MNMFKEAVTFKDVAVAFTEEELGLLGPAQRKLYRDVMVENFRNLLSVGHPPFKQDVSPIERNEQLWIMTTATRRQGNLGEKNQSKLITVQDRESEEELSCWQIWQQIANDLTRCQDSMINNSQCHKQGDFPYQVGTELSIQISEDENYIVNKADGPNNTGNPEFPILRTQDSWRKTFLTESQRLNRDQQISIKNKLCQCKKGVDPIGWISHHDGHRVHKSEKSYRPNDYEKDNMKILTFDHNSMIHTGQKSYQCNECKKPFSDLSSFDLHQQLQSGEKSLTCVERGKGFCYSPVLPVHQKVHVGEKLKCDECGKEFSQGAHLQTHQKVHVIEKPYKCKQCGKGFSRRSALNVHCKVHTAEKPYNCEECGRAFSQASHLQDHQRLHTGEKPFKCDACGKSFSRNSHLQSHQRVHTGEKPYKCEECGKGFICSSNLYIHQRVHTGEKPYKCEECGKGFSRPSSLQAHQGVHTGEKSYICTVCGKGFTLSSNLQAHQRVHTGEKPYKCNECGKSFRRNSHYQVHLVVHTGEKPYKCEICGKGFSQSSYLQIHQKAHSIEKPFKCEECGQGFNQSSRLQIHQLIHTGEKPYKCEECGKGFSRRADLKIHCRIHTGEKPYNCEECGKVFRQASNLLAHQRVHSGEKPFKCEECGKSFGRSAHLQAHQKVHTGDKPYKCDECGKGFKWSLNLDMHQRVHTGEKPYKCGECGKYFSQASSLQLHQSVHTGEKPYKCDVCGKVFSRSSQLQSHQRVHTGEKPYKCEICGKSFSWRSNLTVHHRIHVGDKSYKSNRGGKNIRESTQEKKSIK

SEQ ID NO: 16036 - protein, 799 aa, Homo sapiens
MPSQNYDLPQKKQEKMTKFQEAVTFKDVAVVFSREELRLLDLTQRKLYRDVMVENFKNLVAVGHLPFQPDMVSQLEAEEKLWMMETETQRSSKHQNKMETLQKFALKYLSNQELSCWQIWKQVASELTRCLQGKSSQLLQGDSIQVSENENNIMNPKGDSSIYIENQEFPFWRTQHSCGNTYLSESQIQSRGKQIDVKNNLQIHEDFMKKSPFHEHIKTDTEPKPCKGNEYGKIISDGSNQKLPLGEKPHPCGECGRGFSYSPRLPLHPNVHTGEKCFSQSSHLRTHQRIHPGEKLNRCHESGDCFNKSSFHSYQSNHTGEKSYRCDSCGKGFSSSTGLIIHYRTHTGEKPYKCEECGKCFSQSSNFQCHQRVHTEEKPYKCEECGKGFGWSVNLRVHQRVHRGEKPYKCEECGKGFTQAAHFHIHQRVHTGEKPYKCDVCGKGFSHNSPLICHRRVHTGEKPYKCEACGKGFTRNTDLHIHFRVHTGEKPYKCKECGKGFSQASNLQVHQNVHTGEKRFKCETCGKGFSQSSKLQTHQRVHTGEKPYRCDVCGKDFSYSSNLKLHQVIHTGEKPYKCEECGKGFSWRSNLHAHQRVHSGEKPYKCEQCDKSFSQAIDFRVHQRVHTGEKPYKCGVCGKGFSQSSGLQSHQRVHTGEKPYKCDVCGKGFRYSSQFIYHQRGHTGEKPYKCEECGKGFGRSLNLRHHQRVHTGEKPHICEECGKAFSLPSNLRVHLGVHTREKLFKCEECGKGFSQSARLEAHQRVHTGEKPYKCDICDKDFRHRSRLTYHQKVHTGKKL

SEQ ID NO: 16037 - protein, 825 aa, Homo sapiens
METLTSRHEKRALHSQASAISQDREEKIMSQEPLSFKDVAVVFTEEELELLDSTQRQLYQDVMQENFRNLLSVGERNPLGDKNGKDTEYIQDEELRFFSHKELSSCKIWEEVAGELPGSQDCRVNLQGKDFQFSEDAAPHQGWEGASTPCFPIENSLDSLQGDGLIGLENQQFPAWRAIRPIPIQGSWAKAFVNQLGDVQERCKNLDTEDTVYKCNWDDDSFCWISCHVDHRFPEIDKPCGCNKCRKDCIKNSVLHRINPGENGLKSNEYRNGFRDDADLPPHPRVPLKEKLCQYDEFSEGLRHSAHLNRHQRVPTGEKSVKSLERGRGVRQNTHIRNHPRAPVGDMPYRCDVCGKGFRYKSVLLIHQGVHTGRRPYKCEECGKAFGRSSNLLVHQRVHTGEKPYKCSECGKGFSYSSVLQVHQRLHTGEKPYTCSECGKGFCAKSALHKHQHIHPGEKPYSCGECGKGFSCSSHLSSHQKTHTGERPYQCDKCGKGFSHNSYLQAHQRVHMGQHLYKCNVCGKSFSYSSGLLMHQRLHTGEKPYKCECGKSFGRSSDLHIHQRVHTGEKPYKCSECGKGFRRNSDLHSHQRVHTGERPYVCDVCGKGFIYSSDLLIHQRVHTGEKPYKCAECGKGFSYSSGLLIHQRVHTGEKPYRCQECGKGFRCTSSLHKHQRVHTGKKPYTCDQCGKGFSYGSNLRTHQRLHTGEKPYTCCECGKGFRYGSGLLSHKRVHTGEKPYRCHVCGKGYSQSSHLQGHQRVHTGEKPYKCEECGKGFGRNSCLHVHQRVHTGEKPYTCGVCGKGFSYTSGLRNHQRVHLGENPYK

SEQ ID NO: 16038 - protein, 643 aa, Homo sapiens
MLENYGNVASLGFPLLKPAVISQLEGGSELGGSSPLAAGTGLQGLQTDIQTDNDLTKEMYEGKENVSFELQRDFSQETDFSEASLLEKQQEVHSAGNIKKEKSNTIDGTVKDETSPVEECFFSQSSNSYQCHTITGEQPSGCTGLGKSISFDTKLVKHEIINSEERPFKCEELVEPFRCDSQLIQHQENNTEEKPYQCSECGKAFSINEKLIWHQRLHSGEKPFKCVECGKSFSYSSHYITHQTIHSGEKPYQCKMCGKAFSVNGSLSRHQRIHTGEKPYQCKECGNGFSCSSAYITHQRVHTGEKPYECNDCGKAFNVNAKLIQHQRIHTGEKPYECNECGKGFRCSSQLRQHQSIHTGEKPYQCKECGKGFNNNTKLIQHQRIHTGEKPYECTECGKAFSVKGKLIQHQRIHTGEKPYECNECGKAFRCNSQFRQHLRIHTGEKPYECNECGKAFSVNGKLMRHQRIHTGEKPFECNECGRCFTSKRNLLDHHRIHTGEKPYQCKECGKAFSINAKLTRHQRIHTGEKPFKCMECEKAFSCSSNYIVHQRIHTGEKPFQCKECGKAFHVNAHLIRHQRSHTGEKPFRCVECGKGFSFSSDYIIHQTVHTWKKPYMCSVCGKAFRFSFQLSQHQSVHSEGKS

SEQ ID NO: 16039 - protein, 230 aa, Homo sapiens
MGQQISDQTQLVINKLPEKVAKHVTLVRESGSLTYEEFLGRVAELNDVTAKVASGQEKHLLFEVQPGSDSSAFWKVVVRVVCTKINKSSGIVEASRIMNLYQFIQLYKDITSQAAGVLAQSSTSEEPDENSSSVTSCQASLWMGRVKQLTDEEECCICMDGRADLILPCAHSFCQKCIDKWSDRHRNCPICRLQMTGANESWVVSDAPTEDDMANYILNMADEAGQPHRP

SEQ ID NO: 16040 - protein, 474 aa, Homo sapiens
MTTFKEAVTFKDVAVFFTEEELGLLDPAQRKLYQDVMLENFTNLLSVGHQPFHPFHFLREEKFWMMETATQREGNSGGKTIAEAGPHEDCPCQQIWEQTASDLTQSQDSIINNSHFFEQGDVPSQVEAGLSIIHTGQKPSQNGKCKQSFSDVAIFDPPQQFHSGEKSHTCNECGKSFCYISALRIHQRVHLREKLSKCDMRGKEFSQSSCLQTRERVHTGEKPFKCEQCGKGFRCRAILQVHCKLHTGEKPYICEKCGRAFIHDFQLQKHQIIHTGEKPFKCEICGKSFCLRSSLNRHCMVHTAEKLYKSEECGKGFTDSLDLHKHQIIHTGQKPYNCKECGKSFRWSSYLLIHQRIHSGEKPYRCEECGKGYISKSGLNLHQRVHTGERPYNCKECGKSFSRASSILNHKKLHCRKKPFKCEDCGKRLVHRSFCKDQQGDHNGENSSKCEDCGKRYKRRLNLDIILSLFLNDM

SEQ ID NO: 16041 - protein, 417 aa, Homo sapiens
MAVSLTAAETLALQGTQGQEKMMMMGPKEEEQSCEYETRLPGNHSTSQEIFRQRFRHLRYQETPGPREALSQLRVLCCEWLRPEKHTKEQILEFLVLEQFLTILPEELQSWVRGHHPKSGEEAVTVLEDLEKGLEPEPQVPGPAHGPAQEEPWEKKESLGAAQEALSIQLQPKETQPFPKSEQVYLHFLSVVTEDGPEPKDKGSLPQPPITEVESQVFSEKLATDTSTFEATSEGTLELQQRNPKAERLRWSPAQEESFRQMVVIHKEIPTGKKDHECSECGKTFIYNSHLVVHQRVHSGEKPYKCSDCGKTFKQSSNLGQHQRIHTGEKPFECNECGKAFRWGAHLVQHQRIHSGEKPYECNECGKAFSQSSYLSQHRRIHSGEKPFICKECGKAYGWCSELIRHRRVHARKEPSH

SEQ ID NO: 16042 - protein, 670 aa, Homo sapiens
MTKFQEMVTFKDVAVVFTREELGLLDLAQRKLYQDVMLENFRNLLSVGYQPFKLDVILQLGKEDKLRMMETEIQGDGCSGHKNQNEIDTLQEVRLRFLSYEDLICWQIWEQFTSKLTSNQDLIINLQGKRSKLLKQGDSPCQVWTGESSQVSEDENYVIKLQGESSNSIKNQELPLRTTWDFWRKMYLREPQNYQSRCQQIDVKNKLCKCDHCVRQRIAHQHDDHGVHKREKAFSHNNCGKDCVKESSQHSIIQSGEQTSDENGKGLSVGSNLELHQQLHLRDKPHVNVEYGKGIGYSSGLPRHQCFHIGEKCYRNGDSGEGFSQGSHLQPHQRVSTGENLYRCQVYARSSNQNSCLPSHELTHPGEKLCTCGRCGKGFHHSLDFDIHCVDSAGERACKCDVYDKGFSQTSQLQAHQRGHSRDKTYKWEVSDRIFNRNSGLHQRVHTGEKPYKCEVCDKGFSKASNLQAHQRIHTGEKPYKCDVCDKNFSRNSHLQAHQRVHTGEKPYKCDTCGKDFSQISHLQAHQRVHKGEKPYKCETCGKGFSQSSHLQDHQQVHTGENPYKCDVCGKGFSWSSHLQAHQRVHTGEKPYKCEECRKGFIWNSYLHVHQRIHTGEKPYKCGMCGKSFSQTSHLQAHQRVHTGEKPYKCFVCGKGFSKSSLSSDSSESP

SEQ ID NO: 16043 - protein, 707 aa, Homo sapiens; identical to SEQ ID NO: 16032

SEQ ID NO: 16044 - protein, 700 aa, Homo sapiens
MTTFKEGLTFKDVAVVFTEEELGLLDPVQRNLYQDVMLENFRNLLSVGHHPFKHDVFLLEKEKKLDIMKTATQRKGKSADKIQSEVETVPEAGRHEELYWGQIWKQIASDLIKYEDSMISISRFPRQGDLSCQVRAGLYTTHTGQKFYQCDEYKKSFTDVFNFDLHQQLHSGEKSHTCDECGKSFCYISALHIHQRVHMGEKCYKCDVCGKEFSQSSHLQTHQRVHTVEKPFKCVECGKGFSRRSTLTVHCKLHSGEKPYNCEECGRAFIHASHLQEHQRIHTGEKPFKCDTCGKNFRRRSALNNHCMVHTGEKPYKCEDCGKCFTCSSNLRIHQRVHTGEKPYKCEECGKCFIQPSQFQAHRRIHTGEKPYVCKVCGKGFIYSSSFQAHQGVHTGEKPYKCNECGKSFRMKIHYQVHLVVHTGEKPYKCEVCGKAFRQSSYLKIHLKAHSVQKPFKCEECGQGFNQSSRLQIHQLIHTGEKPYKCEECGKGFSRRADLKIHCRIHTGEKPYNCEECGKVFSQASHLLTHQRVHSGEKPFKCEECGKSFSRSAHLQAHQKVHTGEKPYKCGECGKGFKWSLNLDMHQRVHTGEKPYTCGECGKHFSQASSLQLHQSVHTGEKPYKCDVCGKVFSRSSQLQYHRRVHTGEKPYKCEICGKRFSWRSNLVSHHKIHAAGTFYENDENSKNIRELSEGGSSTR

SEQ ID NO: 16045 - protein, 738 aa, Homo sapiens
MTKFQEAVTFKDVAVAFTEEELGLLDSAQRKLYRDVMLENFRNLVSVGHQSFKPDMISQLEREEKLWMKELQTQRGKHSGDRNQNEMATLHKAGLRCFSLGELSCWQIKRHIASKLARSQDSMINIEGKSSQFPKHHDSPCQVGAGESIQASVDDNCLVNHIGDHSSIIENQEFPTGKVPNSWSKIYLNETQNYQRSCKQTQMKNKLCIFAPYVDIFSCISHHHDDNIVHKRDKVHSNSDCGKDTLKVSPLTQRSIHTGQKTYQGNECEEAFNDSSSLELHKQVHLGKKSPACSTHEKDTSYSSGIPVQQSVRTGKKRYWCHECGKGFSQSSNLQTHQRVHTGEKPYTCHECGKSFNQSSHLYAHLPIHTGEKPYRCDSCGKGFSRSTDLNIHCRVHTGEKPYKCEVCGKGFTQRSHLQAHERIHTGEKPYKCGDCGKRFSCSSNLHTHQRVHTEEKPYKCDECGKCFSLSFNLHSHQRVHTGEKPYKCEECGKGFSSASSFQSHQRVHTGEKPFRCNVCGKGFSQSSYFQAHQRVHTGEKPYKCEVCGKRFNWSLNLHNHQRVHTGEKPYKCEECGKGFSQASNLQAHQSVHTGEKPFKCDACQKRFSQASHLQAHQRVHTGEKPYKCDTCGKAFSQRSNLQVHQIIHTGEKPFKCEECGKEFSWSAGLSAHQRVHTGEKPYTCQQCGKGFSQASHFHTHQRVHTGERPYICDVCCKGFSQRSHLIYHQRVHTGGNL

SEQ ID NO: 16046 - protein, 1845 aa, Homo sapiens
MGLCGLLERCWLHHDPDGVLTLNAENTNYAYQVPNFHKCEICLLSFPKESQFQRHMRDHERNDKPHRCDQCPQTFNVEFNLTLHKCTHSGEDPTCPVCNKKFSRVASLKAHIMLHEKEENLICSECGDEFTLQSQLAVHMEEHRQELAGTRQHACKACKKEFETSSELKEHMKTHYKIRVSSTRSYNRNIDRSGFTYSCPHCGKTFQKPSQLTRHIRIHTGERPFKCSECGKAFNQKGALQTHMIKHTGEKPHACAFCPAAFSQKGNLQSHVQRVHSEVKNGPTYNCTECSCVFKSLGSLNTHISKMHMGGPQNSTSSTETAHVLTATLFQTLPLQQTEAQATSASSQPSSQAVSDVIQQLLELSEPAPVESGQSPQPGQQLSITVGINQDILQQALENSGLSSIPAAAHPNDSCHAKTSAPHAQNPDVSSVSNEQTDPTDAEQEKEQESPEKLDKKEKKMIKKKSPFLPGSIREENGVRWHVCPYCAKEFRKPSDLVRHIRIHTHEKPFKCPQCFRAFAVKSTLTAHIKTHTGIKAFKCQYCMKSFSTSGSLKVHIRLHTGVRPFACPHCDKKFRTSGHRKTHIASHFKHTELRKMRHQRKPAKVRVGKTNIPVPDIPLQEPILITDLGLIQPIPKNQFFQSYFNNNFVNEADRPYKCFYCHRAYKKSCHLKQHIRSHTGEKPFKCSQCGRGFVSAGVLKAHIRTHTGLKSFKCLICNGAFTTGGSLRRHMGIHNDLRPYMCPYCQKTFKTSLNCKKHMKTHRYELAQQLQQHQQAASIDDSTVDQQSMQASTQMQVEIESDELPQTAEVVAANPEAMLDLEPQHVVGTEEAGLGQQLADQPLEADEDGFVAPQDPLRGHVDQFEEQSPAQQSFEPAGLPQGFTVTDTYHQQPQFPPVQQLQDSSTLESQALSTSFHQQSLLQAPSSDGMNVTTRLIQESSQEELDLQAQGSQFLEDNEDQSRRSYRCDYCNKGFKKSSHLKQHVRSHTGEKPYKCKLCGRGFVSSGVLKSHEKTHTGVKAFSCSVCNASFTTNGSLTRHMATHMSMKPYKCPFCEEGFRTTVHCKKHMKRHQTVPSAVSATGETEGGDICMEEEEEHSDRNASRKSRPEVITFTEEETAQLAKIRPQESATVSEKVLVQSAAEKDRISELRDKQAELQDEPKHANCCTYCPKSFKKPSDLVRHVRIHTGEKPYKCDECGKSFTVKSTLDCHVKTHTGQKLFSCHVCSNAFSTKGSLKVHMRLHTGAKPFKCPHCELRFRTSGRRKTHMQFHYKPDPKKARKPMTRSSSEGLQPVNLLNSSSTDPNVFIMNNSVLTGQFDQNLLQPGLVGQAILPASVSAGGDLTVSLTDGSLATLEGIQLQLAANLVGPNVQISGIDAASINNITLQIDPSILQQTLQQGNLLAQQLTGEPGLAPQNSSLQTSDSTVPASVVIQPISGLSLQPTVTSANLTIGPLSEQDSVLTTNSSGTQDLTQVMTSQGLVSPSGGPHEITLTINNSSLSQVLAQAAGPTATSSSGSPQEITLTISELNTTSGSLPSTTPMSPSAISTQNLVMSSSGVGGDASVTLTLADTQGMLSGGLDTVTLNITSQGQQFPALLTDPSLSGQGGAGSPQVILVSHTPQSASAACEEIAYQVAGVSGNLAPGNQPEKEGRAHQCLECDRAFSSAAVLMHHSKEVHGRERIHGCPVCRKAFKRATHLKEHMQTHQAGPSLSSQKPRVFKCDTCEKAFAKPSQLERHSRIHTGERPFHCTLCEKAFNQKSALQVHMKKHTGERPYKCAYCVMGFTQKSNMKLHMKRAHSYAGALQESAGHPEQDGEELSRTLHLEEVVQEAAGEWQALTHVF

SEQ ID NO: 16047 - protein, 458 aa, Homo sapiens
MASTITGSQDCIVNHRGEVDGEPELDISPCQQWGEASSPISRNRDSVMTLQSGCFENIESETYLPLKVSSQIDTQDSSVKFCKNEPQDHQESRRLFVMEESTERKVIKGESCSENLQVKLVSDGQELASPLLNGEATCQNGQLKESLDPIDCNCKDIHGWKSQVVSCSQQRAHTEEKPCDHNNCGKILNTSPDGHPYEKIHTAEKQYECSQCGKNFSQSSELLLHQRDHTEEKPYKCEQCGKGFTRSSSLLIHQAVHTDEKPYKCDKCGKGFTRSSSLLIHHAVHTGEKPYKCDKCGKGFSQSSKLHIHQRVHTGEKPYECEECGMSFSQRSNLHIHQRVHTGERPYKCGECGKGFSQSSNLHIHRCIHTGEKPYQCYECGKGFSQSSDLRIHLRVHTGEKPYHCGKCGKGFSQSSKLLIHQRVHTGEKPYECSKCGKGFSQSSNLHIHQRVHKKDPR

SEQ ID NO: 16048 - protein, 368 aa, Homo sapiens
MSAQSVEEDSILIIPTPDEEEKILRVKLEEDPDGEEGSSIPWNHLPDPEIFRQRFRQFGYQDSPGPREAVSQLRELCRLWLRPETHTKEQILELVVLEQFVAILPKELQTWVRDHHPENGEEAVTVLEDLESELDDPGQPVSLRRRKREVLVEDMVSQEEAQGLPSSELDAVENQLKWASWELHSLRHCDDDGRTENGALAPKQELPSALESHEVPGTLNMGVPQIFKYGETCFPKGRFERKRNPSRKKQHICDECGKHFSQGSALILHQRIHSGEKPYGCVECGKAFSRSSILVQHQRVHTGEKPYKCLECGKAFSQNSGLINHQRIHTGEKPYECVQCGKSYSQSSNLFRHQRRHNAEKLLNVVKV

SEQ ID NO: 16049 - protein, 579 aa, Homo sapiens
MNKSQEQVSFKDVCVDFTQEEWYLLDPAQKILYRDVILENYSNLVSVGYCITKPEVIFKIEQGEEPWILEKGFPSQCHPERKWKVDDVLESSQENEDDHFWELLFHNNKTVSVENGDRGSKTFNLGTDPVSLRNYPYKICDSCEMNLKNISGLIISKKNCSRKKPDEFNVCEKLLLDIRHEKIPIGEKSYKYDQKRNAINYHQDLSQPSFGQSFEYSKNGQGFHDEAAFFTNKRSQIGETVCKYNECGRTFIESLKLNISQRPHLEMEPYGCSICGKSFCMNLRFGHQRALTKDNPYEYNEYGEIFCDNSAFIIHQGAYTRKILREYKVSDKTWEKSALLKHQIVHMGGKSYDYNENGSNFSKKSHLTQLRRAHTGEKTFECGECGKTFWEKSNLTQHQRTHTGEKPYECTECGKAFCQKPHLTNHQRTHTGEKPYECKQCGKTFCVKSNLTEHQRTHTGEKPYECNACGKSFCHRSALTVHQRTHTGEKPFICNECGKSFCVKSNLIVHQRTHTGEKPYKCNECGKTFCEKSALTKHQRTHTGEKPYECNACGKTFSQRSVLTKHQRIHTRVKALSTS

SEQ ID NO: 16050 - protein, 456 aa, Homo sapiens
MNKFQGPVTLKDVIVEFTKEEWKLLTPAQRTLYKDVMLENYSHLVSVGYHVNKPNAVFKLKQGKEPWILEVEFPHRGFPEDLWSIHDLEARYQESQAGNSRNGELTKHQKTHTTEKACECKECGKFFCQKSALIVHQHTHSKGKSYDCDKCGKSFSKNEDLIRHQKIHTRDKTYECKECKKIFYHLSSLSRHLRTHAGEKPYECNQCEKSFYQKPHLTEHQKTHTGEKPFECTECGKFFYVKAYLMVHQKTHTGEKPYECKECGKAFSQKSHLTVHQRMHTGEKPYKCKECGKFFSRNSHLKTHQRSHTGEKPYECKECRKCFYQKSALTVHQRTHTGEKPFECNKCGKTFYYKSDLTKHQRKHTGEKPYECTECGKSFAVNSVLRLHQRTHTGEKPYACKECGKSFSQKSHFIIHQRKHTGEKPYECQECGETFIQKSQLTAHQKTHTKKRNAEK

SEQ ID NO: 16051 - protein, 560 aa, Homo sapiens
MAAARLLPVPAGPQPLSFQAKLTFEDVAVLLSQDEWDRLCPAQRGLYRNVMMETYGNVVSLGLPGSKPDIISQLERGEDPWVLDRKGAKKSQGLWSDYSDNLKYDHTTACTQQDSLSCPWECETKGESQNTDLSPKPLISEQTVILGKTPLGRIDQENNETKQSFCLSPNSVDHREVQVLSQSMPLTPHQAVPSGERPYMCVECGKCFGRSSHLLQHQRIHTGEKPYVCSVCGKAFSQSSVLSKHRRIHTGEKPYECNECGKAFRVSSDLAQHHKIHTGEKPHECLECRKAFTQLSHLIQHQRIHTGERPYVCPLCGKAFNHSTVLRSHQRVHTGEKPHRCNECGKTFSVKRTLLQHQRIHTGEKPYTCSECGKAFSDRSVLIQHHNVHTGEKPYECSECGKTFSHRSTLMNHERIHTEEKPYACYECGKAFVQHSHLIQHQRVHTGEKPYVCGECGHAFSARRSLIQHERIHTGEKPFQCTECGKAFSLKATLIVHLRTHTGEKPYECNSCGKAFSQYSVLIQHQRIHTGEKPYECGECGRAFNQHGHLIQHQKVHRKL

SEQ ID NO: 16052 - protein, 671 aa, Homo sapiens
MAATFQLPGHQEMPLTFQDVAVYFSQAEGRQLGPQQRALYRDVMLENYGNVASLGFPVPKPELISQLEQGKELWVLNLLGAEEPDILKSCQKDSEVGTKKELSILNQKFSEEVKTPEFVSRRLLRDNAQAAEFREAWGREGKLKERVGNSAGQSLNKPNIHKRVLTEATVGRERSLGERTQECSAFDRNLNLDQNVVRLQRNKTGERVFKCDICSKTFKYNSDLSRHQRSHTGEKPYECGRCGRAFTHSSNLVLHHHIHTGNKPFKCDECGKTFGLNSHLRLHRRIHTGEKPFGCGECGKAFSRSSTLIQHRIIHTGEKPYKCNECGRGFSQSPQLTQHQRIHTGEKPHECSHCGKAFSRSSSLIQHERIHTGEKPHKCNQCGKAFSQSSSLFLHHRVHTGEKPYVCNECGRAFGFNSHLTEHVRIHTGEKPYVCNECGKAFRRSSTLVQHRRVHTGEKPYQCVECGKAFSQSSQLTLHQRVHTGEKPYDCGDCGKAFSRRSTLIQHQKVHSGETRKCRKHGPAFVHGSSLTADGQIPTGEKHGRAFNHGANLILRWTVHTGEKSFGCNEYGKAFSPTSRPTEDQIMHAGEKPYKCQECGNAFSGKSTLIQHQVTHTGQKPCHCSVYGKAFSQSSQLTPPQQTRVGEKPALNDGSKRYFIHIKKIFQERHF

SEQ ID NO: 16053 - protein, 211 aa, Homo sapiens
MLRQSCSFPVTSLPALGGVCGREGAGAEVPPAACGCEGRDPDTERSCGRSSTGGCSPCSGPGPSSPRTSRGALSPSLGRLFPHLQVVIKLRIQLAPAVHLALPTCSLLTSSPPLEGCCHRLNEEAEVQRGFRPIAVELEFENQPLGAETRLRNGRRAGVKRSEGRGQVRPGQVRSTGPEGGLTRMERKAARLQWDSGSIKMSENEQLWEEP

SEQ ID NO: 16054 - protein, 499 aa, Homo sapiens
MGPLQFRDVAIEFSLEEWHCLDTAQRNLYRDVMLENYRNLVFLGIVVSKPDLVTCLEQGKKPLTMERHEMIAKPPVMSSHFAQDLWPENIQNSFQIGMLRRYEECRHDNLQLKKGCKSVGEHKVHKGGYNGLNQCLTTTQKEIFQCDKYGKVFHKFSNSNTYKTRHTGINLFKCIICGKAFKRSSTLTTHKKIHTGEKPYRCEECGKAFNQSANLTTHKRIHTGEKPYRCEECGKAFKQSSNLTTHKKIHTGEKPYKCEECGKAFNRSTDLTTHKIVHTGEKPYKCEECGKAFKHPSHVTTHKKIHTRGKPYNCEECGKSFKHCSNLTIHKRIHTGEKPYKCEECGKAFHLSSHLTTHKILHTGEKPYRCRECGKAFNHSTTLFSHEKIHTGEKPYKCDECGKTFTWPSILSKHKRTHTGEKPYKCEECGKSFTASSTLTTHKRIHTGEKPYKCEECGKAFNWSSDLNKHKKIHIERKPYIVKNVTDLLNVPPLLISIR

SEQ ID NO: 16055 - protein, 659 aa, Homo sapiens
MPGPPRSLEMGLLTFRDVAIEFSLEEWQHLDIAQQNLYRNVMLENYRNLAFLGIAVSKPDLITCLEQGKEPWNMKRHEMVDEPPGMCPHFAQDLWPEQGMEDSFQKAILRRYGKYGHENLQLRKGCKSVDEYKVNKEGYNGLNQCFTTAQSKVFQCDKYLKVFYKFLNSNRPKIRHTEKKSFKCKKRVKLFCMLSHKTQHKSIYHREKSYKCKECGKTFNWSSTLTNHRKIYTEEKPYKCEEYNKSPKQLSTLTTHEIIHAGEKLYKCEECGEAFNRSSNLTTHKIIHTGEKPYKCEECGKAFIWSSTLTEHKKIHTRKKPYKCEECGKAFIWSSTLTRHKRMHTGEKPYKCEECGKAFSQSSTLTTHKIIHTGEKRYKCLECGKAFKQLSTLTTHKIIHVGEKLYKCEECGKGFNRSSNLTTHKIIHTGEKPYKCEECGKAFIWSSTLTKHKRIHTREKPYKCEECGKAFIWSSTLTRHKRMHTGEKPYKCEECGKSFSQSSTLTTHKIIHTGEKPYKCEECGKAFNWSSTLTKHKIIHTEEKPYKCEKCGKAFKQSSILTNHKRIHTGEKPYKCEECGKSFNRSSTFTKHKVIHTGVKPYKCEECGKAFFWSSTLTKHKRIHTGEQPYKWEKFGKAFNRSSHLTTDKITHWREILQV

SEQ ID NO: 16056 - protein, 627 aa, Homo sapiens
MAAAELTAPAQGIVTFEDVAVYFSWKEWGLLDEAQKCLYHDVMLENLTLTTSLGGSGAGDEEAPYQQSTSPQRVSQVRIPKALPSPQKTNPCEICGPVLRQILHLVEHQGTHHGQKLYTDGACRKQLQFTAYLHQHQKQHVGQKHFRSNGGRDMFLSSCTFEVSGKPFTCKEVGKDFLVRSRFLQQQAAHTRKKSNRTKSAVAFHSVKNHYNWGECVKAFSYKHVRVQHQGDLIRERSYMCSECGKSFSTSCSLSDHLRVHTSEKPYTCGECGKSYRQSSSLITHRRIHTGVRPHQCDECGKLFNRKYDLLIHQRVHTGERPYKCSECGKSFSHSSSLITHQRIHTGMRPYECSECGKSFIHSSSLITHQRVHTGTRPYMCSECGKSFSQSCHLIKHRRLHIGEGPYECSECGKLFTYRSRFFQHQRVHTGVRSHECHECGKLFSRKFDLIVHERVHTGERPYECSECGKSFTCKSYLISHWKVHTGARPYECGECGKSFTHSSTLLQHQRVHTGERPYECNECGKFFSQSSSLIRHRRSHTGERPYECSECWKSFSNHSSLVKHRRVHTGERPYECSECGKSFSQSSNLTNHQRIHSGERPYECSDCGKFFTFNSNLLKHQNVHKG

SEQ ID NO: 16057 - protein, 563 aa, Homo sapiens
MGPLTIRDVTVEFSLEEWHCLDTAQQNLYRDVMLENYRNLVFLGIAVSKPDLITCLEQGKEPCNMKRHEMVAKPPVMCSHIAEDLCPERDIKYFFQKVILRRYDKCEHENLQLRKGCKSVDECKVCKGGYNGLNQCLITTQSKMYQCDKYVKVFYKFSNSDRHKIRHTEKKTCKCKECGKSFCMLSQLTRHKRIHIRENSHKCEECGKAFNQSSALTRHKMTHTGEKPYKCEECGKAFNRSSHLTQHKVIHTREKPYKCEECGKAFNRSSHITQHKRIHNREKPFKYDECCKAFKWSSALTTLTQHKRIHTGEKPYKCEECGKAFNQSSALTRHKMIHTGEKPFQCEECGKAFNRSSHLTQHKIIHTKEKPYKCEECGKAFNRSSHLTKHKRIHTREKAYKCDEYCKAFNWSSALTTLTQHKIIHTGEKPYKCEECGKAFNRSSYLIRHKIIHTGEKPYKCEECGKAFNQSSHLTQHKIIHTGEKPYKCEECGKAFNRSSHLSQHKIIHTGEKPYKCEECGKPFNRFSYLTVHKRIHAGENPNKYEECGKACNHSSNLTKHNS

SEQ ID NO: 16058 - protein, 533 aa, Homo sapiens; identical to SEQ ID NO: 14413

SEQ ID NO: 16059 - protein, 412 aa, Homo sapiens
MIGMLESLQHESDLLQHDQIHTGEKPYECNECRKTFSLKQNLVEHKKMHTGEKSHECTECGKVCSRVSSLTLHLRSHTGKKAYKCNKCGKAFSQKENFLSHQKHHTGEKPYECEKVSIQMPTIIRHQKNHTGTKPYACKECGKAFNGKAYLTEHEKIHTGEKPFECNQCGRAFSQKQYLIKHQNIHTGKKPFKCSECGKAFSQKENLIIHQRIHTGEKPYECKGCGKAFIQKSSLIRHQRSHTGEKPYTCKECGKAFSGKSNLTEHEKIHIGEKPYKCNECGTIFRQKQYLIKHHNIHTGEKPYECNKCGKAFSRITSLIVHVRIHTGDKPYECKVCGKAFCQSSSLTVHMRSHTGEKPYGCNECGKAFSQFSTLALHMRIHTGEKPYQCSECGKAFSQKSHHIRHQRIHTH

SEQ ID NO: 16060 - protein, 683 aa, Homo sapiens
MASGPGSQEREGLLIVKLEEDCAWSQELPPPDPGPSPEASHLRFRRFRFQEAAGPREALSRLQELCHGWLRPEMRTKEQILELLVLEQFLTILPQEIQSRVQELHPESGEEAVTLVEDMQRELGRLRQQVTNHGRGTEVLLEEPLPLETARESPSFKLEPMETERSPGPRLQELLGPSPQRDPQAVKERALSAPWLSLFPPEGNMEDKEMTGPQLPESLEDVAMYISQEEWGHQDPSKRALSRDTVQESYENVDSLESHIPSQEVPGTQVGQGGKLWDPSVQSCKEGLSPRGPAPGEEKFENLEGVPSVCSENIHPQVLLPDQARGEVPWSPELGRPHDRSQGDWAPPPEGGMEQALAGASSGRELGRPKELQPKKLHLCPLCGKNFSNNSNLIRHQRIHAAERLCMGVDCTEIFGGNPRFLSLHRAHLGEEAHKCLECGKCFSQNTHLTRHQRTHTGEKPYQCNICGKCFSCNSNLHRHQRTHTGEKPYKCPECGEIFAHSSNLLRHQRIHTGERPYKCPECGKSFSRSSHLVIHERTHERERLYPFSECGEAVSDSTPFLTNHGAHKAEKKLFECLTCGKSFRQGMHLTRHQRTHTGEKPYKCTLCGENFSHRSNLIRHQRIHTGEKPYTCHECGDSFSHSSNRIRHLRTHTGERPYKCSECGESFSRSSRLMSHQRTHTG

SEQ ID NO: 16061 - protein, 627 aa, Homo sapiens
MAAAVLTDRAQVSVTFDDVAVTFTKEEWGQLDLAQRTLYQEVMLENCGLLVSLGCPVPKAELICHLEHGQEPWTRKEDLSQDTCPGDKGKPKTTEPTTCEPALSEGISLQGQVTQGNSVDSQLGQAEDQDGLSEMQEGHFRPGIDPQEKSPGKMSPECDGLGTADGVCSRIGQEQVSPGDRVRSHNSCESGKDPMIQEEENNFKCSECGKVFNKKHLLAGHEKIHSGVKPYECTECGKTFIKSTHLLQHHMIHTGERPYECMECGKAFNRKSYLTQHQRIHSGEKPYKCNECGKAFTHRSNFVLHNRRHTGEKSFVCTECGQVFRHRPGFLRHYVVHSGENPYECLECGKVFKHRSYLMWHQQTHTGEKPYECSECGKVFLESAALIHHYVIHTGEKPFECLECGKAFNHRSYLKRHQRIHTGEKPFVCSECGKAFTHCSTFILHKRAHTGEKPFECKECGKAFSNRKDLIRHFSIHTGEKPYECVECGKAFTRMSGLTRHKRIHSGEKPYECVECGKSFCWSTNLIRHAIIHTGEKPYKCSECGKAFSRSSSLTQHQRMHTGKNPISVTDVGRPFTSGQTSVTLRELLLGKDFLNVTTEANILPEETSSSASDQPYQRETPQVSSL

SEQ ID NO: 16062 - protein, 549 aa, Homo sapiens
MLENYKNLATVGYQLFKPSLISWLEQEESRTVQRGDFQASEWKVQLKTKELALQQDVLGEPTSSGIQMIGSHNGGEVSDVKQCGDVSSEHSCLKTHVRTQNSENTFECYLYGVDFLTLHKKTSTGEQRSVFSQCGKAFSLNPDVVCQRTCTGEKAFDCSDSGKSFINHSHLQGHLRTHNGESLHEWKECGRGFIHSTDLAVRIQTHRSEKPYKCKECGKGFRYSAYLNIHMGTHTGDNPYECKECGKAFTRSCQLTQHRKTHTGEKPYKCKDCGRAFTVSSCLSQHMKIHVGEKPYECKECGIAFTRSSQLTEHLKTHTAKDPFECKICGKSFRNSSCLSDHFRIHTGIKPYKCKDCGKAFTQNSDLTKHARTHSGERPYECKECGKAFARSSRLSEHTRTHTGEKPFECVKCGKAFAISSNLSGHLRIHTGEKPFECLECGKAFTHSSSLNNHMRTHSAKKPFTCMECGKAFKFPTCVNLHMRIHTGEKPYKCKQCGKSFSYSNSFQLHERTHTGEKPYECKECGKAFSSSSSFRNHERRHADERLSA

SEQ ID NO: 16063 - protein, 743 aa, Homo sapiens
MGLLTFRDVAVEFSLEEWEHLEPAQKNLYQDVMLENYRNLVSLGLVVSKPDLITFLEQRKEPWNVKSEETVAIQPDVFSHYNKDLLTEHCTEASFQKVISRRHGSCDLENLHLRKRWKREECEGHNGCYDEKTFKYDQFDESSVESLFHQQILSSCAKSYNFDQYRKVFTHSSLLNQQEEIDIWGKHHIYDKTSVLFRQVSTLNSYRNVFIGEKNYHCNNSEKTLNQSSSPKNHQENYFLEKQYKCKEFEEVFLQSMHGQEKQEQSYKCNKCVEVCTQSLKHIQHQTIHIRENSYSYNKYDKDLSQSSNLRKQIIHNEEKPYKCEKCGDSLNHSLHLTQHQIIPTEEKPCKWKECGKVFNLNCSLYLTKQQQIDTGENLYKCKACSKSFTRSSNLIVHQRIHTGEKPYKCKECGKAFRCSSYLTKHKRIHTGEKPYKCKECGKAFNRSSCLTQHQTTHTGEKLYKCKVCSKSYARSSNLIMHQRVHTGEKPYKCKECGKVFSRSSCLTQHRKIHTGENLYKCKVCAKPFTCFSNLIVHERIHTGEKPYKCKECGKAFPYSSHLIRHHRIHTGEKPYKCKACSKSFSDSSGLTVHRRTHTGEKPYTCKECGKAFSYSSDVIQHRRIHTGQRPYKCEECGKAFNYRSYLTTHQRSHTGERPYKCEECGKAFNSRSYLTTHRRRHTGERPYKCDECGKAFSYRSYLTTHRRSHSGERPYKCEECGKAFNSRSYLIAHQRSHTREKL

SEQ ID NO: 16064 - protein, 947 aa, Homo sapiens
MATRVRTASIWVPPLQERNSSWDRIRKLQGQESILGQGTPGLQPLPGTPRQKQKSRRIEKVLEWLFISQEQPKITKSWGPLSFMDVFVDFTWEEWQLLDPAQKCLYRSVMLENYSNLVSLGYQHTKPDIIFKLEQGEELCMVQAQVPNQTCPNTVWKIDDLMDWHQENKDKLGSTAKSFECTTFGKLCLLSTKYLSRQKPHKCGTHGKSLKYIDFTSDYARNNPNGFQVHGKSFFHSKHEQTVIGIKYCESIESGKTVNKKSQLMCQQMYMGEKPFGCSCCEKAFSSKSYLLVHQQTHAEEKPYGCNECGKDFSSKSYLIVHQRIHTGEKLHECSECRKTFSFHSQLVIHQRIHTGENPYECCECGKVFSRKDQLVSHQKTHSGQKPYVCNECGKAFGLKSQLIIHERIHTGEKPYECNECQKAFNTKSNLMVHQRTHTGEKPYVCSDCGKAFTFKSQLIVHQGIHTGVKPYGCIQCGKGFSLKSQLIVHQRSHTGMKPYVCNECGKAFRSKSYLIIHTRTHTGEKLHECNNCGKAFSFKSQLIIHQRIHTGENPYECHECGKAFSRKYQLISHQRTHAGEKPYECTDCGKAFGLKSQLIIHQRTHTGEKPFECSECQKAFNTKSNLIVHQRTHTGEKPYSCNECGKAFTFKSQLIVHKGVHTGVKPYGCSQCAKTFSLKSQLIVHQRSHTGVKPYGCSECGKAFRSKSYLIIHMRTHTGEKPHECRECGKSFSFNSQLIVHQRIHTGENPYECSECGKAFNRKDQLISHQRTHAGEKPYGCSECGKAFSSKSYLIIHMRTHSGEKPYECNECGKAFIWKSLLIVHERTHAGVNPYKCSQCEKSFSGKLRLLVHQRMHTREKPYECSECGKAFIRNSQLIVHQRTHSGEKPYGCNECGKTFSQKSILSAHQRTHTGEKPCKCTECGKAFCWKSQLIMHQRTHVDDKH

SEQ ID NO: 16065 - protein, 569 aa, Homo sapiens
MSSAPRGPPSVAPLPAGIGRSTAKTPGLPGSLEMGPLTFRDVAIEFSLEEWQCLDTSQQNLYRNVMLDNYRNLVFLGIAVSKPDLITCLEQGKEPCNMKRHAMVAKPPVVCSHFAQDLWPKQGLKDSFQKVILRRYGKYGHENLQLRKGCKSADEHKVHKRGYNGLNQCLTTTQSKIFQCDKYVKVLHKFSNSNIHKKRQTGKKPFKCKECGKSCCILSQLTQHKKTATRVNFYKCKTCGKAFNQFSNLTKHKIIHPEVNPYKCEECGKAFNQSLTLTKHKKIHTEEKPYKCEDCGKVFSVFSVLTKHKIIHTGTKPYNCEECGKGFSIFSTLTKHKIIHTGEKPYKCNECGKAFNWSSTLTKHKRIHTGEKPYKCEECGKAFNQSSTLTRHKIVHTGEKPYKCEECGKAFKRSTTLTKHKRIYTKEKPYKCEECGKAFSVFSTLTKHKIIHTGAKPYKCEECGSAFRAFSTLTEHKRVHTGEKPYKCNECGKAFNWSSTLTKHKRIHTGEKPYKCEECGKAFNRSSNLTRHKKIHTGEKPYKPKRCDSAFDNTPNFSRHKRNHMGEKS

SEQ ID NO: 16066 - protein, 653 aa, Homo sapiens
MASRLPTAWSCEPVTFEDVTLGFTPEEWGLLDLKQKSLYREVMLENYRNLVSVEHQLSKPDVVSQLEEAEDFWPVERGIPQDTIPEYPELQLDPKLDPLPAESPLMNIEVVEVLTLNQEVAGPRNAQIQALYAEDGSLSADAPSEQVQQQGKHPGDPEAARQRFRQFRYKDMTGPREALDQLRELCHQWLQPKARSKEQILELLVLEQFLGALPVKLRTWVESQHPENCQEVVALVEGVTWMSEEEVLPAGQPAEGTTCCLEVTAQQEEKQEDAAICPVTVLPEEPVTFQDVAVDFSREEWGLLGPTQRTEYRDVMLETFGHLVSVGWETTLENKELAPNSDIPEEEPAPSLKVQESSRDCALSSTLEDTLQGGVQEVQDTVLKQMESAQEKDLPQKKHFDNRESQANSGALDTNQVSLQKIDNPESQANSGALDTNQVLLHKIPPRKRLRKRDSQVKSMKHNSRVKIHQKSCERQKAKEGNGCRKTFSRSTKQITFIRIHKGSQVCRCSECGKIFRNPRYFSVHKKIHTGERPYVCQDCGKGFVQSSSLTQHQRVHSGERPFECQECGRTFNDRSAISQHLRTHTGAKPYKCQDCGKAFRQSSHLIRHQRTHTGERPYACNKCGKAFTQSSHLIGHQRTHNRTKRKKKQPTS

SEQ ID NO: 16067 - protein, 429 aa, Homo sapiens
MMSHPCVSLLGVPVLNPALVPHLAQGQVLLVSDPSPNTDPAKYSESTSATRHQMKGEDAQPQEMASTSFPRASGPSPEFRQHGDSDGKRGSPQNLPIEHHFACKECGDTFRLKVLLVQHQRVHSEEKGWECGDCGKVFRGVAEFNEHRKSHVAAEPQPGPSRALENAAEKREQMEREAKPFECEECGKRFKKNAGLSQHLRVHSREKPFDCEECGRSFKVNTHLFRHQKLHTSEKPFACKACSRDFLDRQELLKHQRMHTGHLPFDCDDCGKSFRGVNGLAEHQRIHSGAKPYGCPHCGKLFRRSSELTKHRRIHTGEKPYACGQCGKAFRQSSSLLEHARIHSGERPYACGECGKAFRGPSDLIKHRRIHSGLKPYECDKCGKAFRRSSGLSRHRRIHSGARRCECSQCGRVFKRRSALQKHQPTHHE

SEQ ID NO: 16068 - protein, 614 aa, Homo sapiens
MKRDRLGRFLSPGSSRQCGASDGGGGVSRTRGRPSLSGGPRVDGATARRAWGPVGSCGDAGEDGADEAGAGRALAMGHCRLCHGKFSSRSLRSISERAPGASMERPSAEERVLVRDFQRLLGVAVRQDPTLSPFVCKSCHAQFYQCHSLLKSFLQRVNASPAGRRKPCAKVGAQPPTGAEEGACLVDLITSSPQCLHGLVGWVHGHAASCGALPHLQRTLSSEYCGVIQVVWGCDQGHDYTMDTSSSCKAFLLDSALAVKWPWDKETAPRLPQHRGWNPGDAPQTSQGRGTGTPVGAETKTLPSTDVAQPPSDSDAVGPRSGFPPQPSLPLCRAPGQLGEKQLPSSTSDDRVKDEFSDLSEGDVLSEDENDKKQNAQSSDESFEPYPERKVSGKKSESKEAKKSEEPRIRKKPGPKPGWKKKLRCEREELPTIYKCPYQGCTAVYRGADGMKKHIKEHHEEVRERPCPHPGCNKVFMIDRYLQRHVKLIHTEVRNYICDECGQTFKQRKHLLVHQMRHSGAKPLQCEVCGFQCRQRASLKYHMTKHKAETELDFACDQCGRRFEKAHNLNVHMSMVHPLTQTQDKALPLEAEPPPGPPSPSVTTEGQAVKPEPT

SEQ ID NO: 16069 - protein, 450 aa, Homo sapiens
MAASKTQGAVARMQEDRDGSCSTVGGVGYGDSKDCILEPLSLPESPGGTTTLEGSPSVPCIFCEEHFPVAEQDKLLKHMIIEHKIVIADVKLVADFQRYILYWRKRFTEQPITDFCSVIRINSTAPFEEQENYFLLCDVLPEDRILREELQKQRLREILEQQQQERNDTNFHGVCMFCNEEFLGNRSVILNHMAREHAFNIGLPDNIVNCNEFLCTLQKKLDNLQCLYCEKTFRDKNTLKDHMRKKQHRKINPKNREYDRFYVINYLELGKSWEEVQLEDDRELLDHQEDDWSDWEEHPASAVCLFCEKQAETIEKLYVHMEDAHEFDLLKIKSELGLNFYQQVKLVNFIRRQVHQCRCYGCHVKFKSKADLRTHMEETKHTSLLPDRKTWDQLEYYFPTYENDTLLCTLSDSESDLTAQEQNENVPIISEDTSKLYALKQSSILNQLLL

SEQ ID NO: 16070 - protein, 718 aa, Homo sapiens
MALPQGLLTFRDVAIEFSQEEWKCLDPAQRTLYRDVMLENYRNLVSLDISSKCMMKTFFSTGQGNTEAFHTGTLQRQASHHIGDFCFQKIEKDIHGFQFQWKEDETNDHAAPMTEIKELTGSTGQHDQRHAGNKHIKDQLGLSFHSHLPELHIFQPEGKIGNQVEKSINNASSVSTSQRICCRPKTHISNKYGNNSLHSSLLTQKRNVHMREKSFQCIESGKSFNCSSLLKKHQITHLEEKQCKCDVYGKVFNQKRYLACHRRSHIDEKPYKCNECGKIFGHNTSLFLHKALHTADKPYECEECDKVFSRKSHLETHKIIYTGGKPYKCKVCDKAFTCNSYLAKHTIIHTGEKPYKCNECGKVFNRLSTLARHRRLHTGEKPYECEECEKVFSRKSHLERHKRIHTGEKPYKCKVCDKAFAYNSYLAKHSIIHTGEKPYKCNECGKVFNQQSTLARHHRLHTAEKPYKCEECDKVFRCKSHLERHRRIHTGEKPYKCKVCDKAFRSDSCLTEHQRVHTGEKPYMCNECGKVFSTKANLACHHKLHTAEKPYKCEECEKVFSRKSHMERHRRIHTGEKPYKCKVCDKAFRRDSHLAQHQRVHTGEKPYKCNECGKTFRQTSSLIIHRRLHTGEKPYKCNECGKTFSQMSSLVYHHRLHSGEKPYKCNECGKVFNQQAHLAQHQRVHTGEKPYKCNECGKTFSQMSNLVYHHRLHSGEKP

SEQ ID NO: 16071 - protein, 542 aa, Homo sapiens
MGDIFLCKKVESPKKNLRESKQREEDDEDPDLIYVGVEHVHRDAEVLFVGMISNSKPVVSNILNRVTPGSKSRRKKGHFRQYPAHVSQPANHVTSMAKAIMPVSLSEGRSTDSPVTMKSSSEPGYKMSSPQVVSPNYSDSLPPGTQCLVGAMVSGGGRNESSPDSKRLSTSDINSRDSKRVKLRDGIPGVPSLAVVPSDMSSTISTNTPSQGICNSSNHVQNGVTFPWPDANGKAHFNLTDPERANESGLAMTDISSLASQNKTFDPKKENPIVLLSNFYYGQHKGDGQPEQKTHTTFKCLSCVKVLKNIKFMNHMKHHLEFEKQRNDSWEDHTTCQHCHRQFPTPFQLQCHIDSVHIAMGPSAVCKICELSFETDQVLLQHMKDHHKPGEMPYVCQVCHYRSSVFADVETHFRTCHENTKNLLCLFCLKLFKTAIPYMNHCWRHSRRRVLQCSKCRLQFLTLKEEIEHKTKDHQTFKKPEQLQGFPRETKVIIQTSVQPGSSGMASVIVSNTDPQSSPVKTKKKTAMNTRDSRLPCSKDSS

SEQ ID NO: 16072 - protein, 543 aa, Homo sapiens
MEQSCEEEKEPEPQKNIQETKQVDDEDAELIFVGVEHVNEDAELIFVGVTSNSKPVVSNILNRVTPGSWSRRKKYDHLRKDTARKLQPKSHETVTSEAVTVLPASQLESRSTDSPIIIEPLSKPDYRNSSPQVVPNNSSELPSPLITFTDSLHHPVSTALSVGGINESPRVSKQLSTFEVNSINPKRAKLRDGIIEGNSSASFPSDTFHTMNTQQSTPSNNVHTSLSHVQNGAPFPAAFPKDNIHFKPINTNLDRENELAKTDILSLTSQNKTFDPKKENPIVLLSDFYYGQHKGEGQPEQKTHTTFKCLSCVKVLKNVKFMNHVKHHLEFEKQRNDSWENHTTCQHCHRQFPTPFQLQCHIENVHTAQEPSTVCKICELSFETDQVLLQHMKDHHKPGEMPYVCQVCHYRSSVFADVETHFRTCHENTKNLLCPFCLKIFKTATPYMCHYRGHWGKSAHQCSKCRLQFLTFKEKMEHKTQCHQMFKKPKQLEGLPPETKVTIQVSLEPLQPGSVDVASITVSTSDSEPSLPRSKSKISKKSH

SEQ ID NO: 16073 - protein, 737 aa, Homo sapiens
MDDDKPFQPKNISKMAELFMECEEEELEPWQKKVEETQDEDDDELIFVGEISSSKPAISNILNRGHSSSSSKGIKSEPHSPGIPEIFRTASQRCRDPPSNPVAASPRFHLVSKSSQSSVTVENASKPDFTKNSQVGSDNSSILLFDSTQESLPPSQDIPAIFREGMKNTSYVLKHPSTSKVNSVTPKKPKTSEDVPQINPSTSLPLIGSPPVTSSQVMLSKGTNTSSPYDAGADYLRACPKCNVQFNLLDPLKYHMKHCCPDMITKFLGVIVKSERPCDEDKTDSETGKLIMLVNEFYYGRHEGVTEKEPKTYTTFKCFSCSKVLKNNIRFMNHMKHHLELEKQNNESWENHTTCQHCYRQYPTPFQLQCHIESTHTPHEFSTICKICELSFETEHILLQHMKDTHKPGEMPYVCQVCQFRSSTFSDVEAHFRAAHENTKNLLCPFCLKVSKMATPYMNHYMKHQKKGVHRCPKCRLQFLTSKEKAEHKAQHRTFIKPKELEGLPPGAKVTIRASLGPLQSKLPTAPFGCAPGTSFLQVTPPTSQNTTARNPRKSNASRSKTSKLHATTSTASKVNTSKPRGRIAKSKAKPSYKQKRQRNRKNKMSLALKNIRCRRGIHKCIECHSKIKDFASHFSIYIHCSFCKYNTNCNKAFVNHMMSSHSNHPGKRFCIFKKHSGTLRGITLVCLKCDFLADSSGLDRMAKHLSQRKTHTCQVIIENVSKSTSTSEPTTGCSLK

SEQ ID NO: 16074 - protein, 979 aa, Homo sapiens
MGDNPFQPKSNSKMAELFMECEEEELEPWQKKVKEVEDDDDDEPIFVGEISSSKPAISNILNRVNPSSYSRGLKNGALSRGITAAFKPTSQHYTNPTSNPVPASPINFHPESRSSDSSVIVQPFSKPGYITNSSRVVSNKSSELLFDLTQDTGLSHYQGGPTLSMAGMSESSFLSKRPSTSEVNNVNPKKPKPSESVSGANSSAVLPSVKSPSVTSSQAMLAKGTNTSSNQSKNGTPFPRACPKCNIHFNLLDPLKNHMKYCCPDMINNFLGLAKTEFSSTVNKNTTIDSEKGKLIMLVNDFYYGKHEGDVQEEQKTHTTFKCFSCLKILKNNIRFMNHMKHHLELEKQSSESWENHTTCQHCYRQFPTPFQLQCHIESTHTPHEFSTICKICELSFETEHVLLQHMKDNHKPGEMPYVCQVCNYRSSSFSDVETHFRTSHENTKNLLCPFCLKVIKIATPYMHHYMKHQKKGIHRCTKCRLQFLTCKEKMDHKTQHHRTFIKPKQLEGLPPGTKVTIRASVGPLQSGASPTPSISASASTLQLSPPRTKNITAKNPAKSNTSKPNTVKSNASKPNTSKPNGSKSKYKPKISNMQKKQSTLASSNKKSKVNTALRNLRYRRGIHKCIECCSEIKDFANHFPTYVHCSFCRYNTSCSKAYVNHMMSFHSNRPSKRFCIFKKHSENLRGITLVCLNCDFLSDVSGLDNMATHLSQHKTHTCQVVMQKVSVCIPTSEHLSELKKEAPAKEQEPVSKEIARPNMAERETETSNSESKQDKAASSKEKNGCNANSFEGSSTTKSEESITVSDKENETCLADQETGSKNIVSCDSNIGADKVEKKKQIQHVCQEMELKMCQSSENIILSDQIKDHNSSEARFSSKNIKDLRLASDNVSIDQFLRKRHEPESVSSDVSEQGSIHLEPLTPSEVLEYEATEILQKGSGDPSAKTDEVVSDQTDDIPGGNNPSTTEATVDLEDEKERS

SEQ ID NO: 16075 - protein, 895 aa, Homo sapiens
MKIGSGFLSGGGGTGSSGGSGSGGGGSGGGGGGGSSGRRAEMEPTFPQGMVMFNHRLPPVTSFTRPAGSAAPPPQCVLSSSTSAAPAAEPPPPPAPDMTFKKEPAASAAAFPSQRTSWGFLQSLVSIKQEKPADPEEQQSHHHHHHHHYGGLFAGAEERSPGLGGGEGGSHGVIQDLSILHQHVQQQPAQHHRDVLLSSSSRTDDHHGTEEPKQDTNVKKAKRPKPESQGIKAKRKPSASSKPSLVGDGEGAILSPSQKPHICDHCSAAFRSSYHLRRHVLIHTGERPFQCSQCSMGFIQKYLLQRHEKIHSREKPFGCDQCSMKFIQKYHMERHKRTHSGEKPYKCDTCQQYFSRTDRLLKHRRTCGEVIVKGATSAEPGSSNHTNMGNLAVLSQGNTSSSRRKTKSKSIAIENKEQKTGKTNESQISNNINMQSYSVEMPTVSSSGGIIGTGIDELQKRVPKLIFKKGSRKNTDKNYLNFVSPLPDIVGQKSLSGKPSGSLGIVSNNSVETIGLLQSTSGKQGQISSNYDDAMQFSKKRRYLPTASSNSAFSINVGHMVSQQSVIQSAGVSVLDNEAPLSLIDSSALNAEIKSCHDKSGIPDEVLQSILDQYSNKSESQKEDPFNIAEPRVDLHTSGEHSELVQEENLSPGTQTPSNDKASMLQEYSKYLQQAFEKSTNASFTLGHGFQFVSLSSPLHNHTLFPEKQIYTTSPLECGFGQSVTSVLPSSLPKPPFGMLFGSQPGLYLSALDATHQQLTPSQELDDLIDSQKNLETSSAFQSSSQKLTSQKEQKNLESSTGFQIPSQELASQIDPQKDIEPRTTYQIENFAQAFGSQFKSGSRVPMTFITNSNGEVDHRVRTSVSDFSGYTNMMSDVSEPCSTRVKTPTSQSYR

SEQ ID NO: 16076 - protein, 671 aa, Homo sapiens
MQFVSTRPQPQQLGIQGLGLDSGSWSWAQALPPEEVCHQEPALRGEMAEGMPPMQAQEWDMDARRPMPFQFPPFPDRAPVFPDRMMREPQLPTAEISLWTVVAAIQAVERKVDAQASQLLNLEGRTGTAEKKLADCEKTAVEFGNHMESKWAVLGTLLQEYGLLQRRLENLENLLRNRNFWVLRLPPGSKGEAPKVPVTFVDIAVYFSEDEWKNLDEWQKELYNNLVKENYKTLMSLDAEGSVPKPDAPVQAEPREEPCVWEQRHPEEREIPMDPEAGAEPLVPAQDASSQVKREDTLCVRGQRGLEERAIPTESITDSPISAQDLLSRIKQEEHQCVWDQQDLADRDIPTDPNSESLISAHDILSWIKQEEQPYPWGPRDSMDGELGLDSGPSDSLLMVKNPPPAPPQPQPQPQPPQPQLQSQPQPQSLPPIAVAENPGGPPSRGLLDDGFQVLPGERGSGEAPPGGDRSTGGGGGDGGGGGGGAEAGTGAGGGCGSCCPGGLRRSLLLHGARSKPYSCPECGKSFGVRKSLIIHHRSHTKERPYECAECEKSFNCHSGLIRHQMTHRGERPYKCSECEKTYSRKEHLQNHQRLHTGERPFQCALCGKSFIRKQNLLKHQRIHTGERPYTCGECGKSFRYKESLKDHLRVHSGGPGPGAPRQLPPPPERD

SEQ ID NO: 16077 - protein, 679 aa, Homo sapiens
MESRSVAQAGVQWCDLGSLQAPPPGFTLFSCLSLLSSWDYSSGFSGFCASPIEESHGALISSCNSRTMTDGLVTFRDVAIDFSQEEWECLDPAQRDLYVDVMLENYSNLVSLDLESKTYETKKIFSENDIFEINFSQWEMKDKSKTLGLEASIFRNNWKCKSIFEGLKGHQEGYFSQMIISYEKIPSYRKSKSLTPHQRIHNTEKSYVCKECGKACSHGSKLVQHERTHTAEKHFECKECGKNYLSAYQLNVHQRFHTGEKPYECKECGKTFSWGSSLVKHERIHTGEKPYECKECGKAFSRGYHLTQHQKIHTGVKSYKCKECGKAFFWGSSLAKHEIIHTGEKPYKCKECGKAFSRGYQLTQHQKIHTGKKPYECKICGKAFCWGYQLTRHQIFHTGEKPYECKECGKAFNCGSSLIQHERIHTGEKPYECKECGKAFSRGYHLSQHQKIHTGEKPFECKECGKAFSWGSSLVKHERVHTGEKSHECKECGKTFCSGYQLTRHQVFHTGEKPYECKECGKAFNCGSSLVQHERIHTGEKPYECKECGKAFSRGYHLTQHQKIHTGEKPFKCKECGKAFSWGSSLVKHERVHTNEKSYECKDCGKAFGSGYQLSVHQRFHTGEKLYQRKEFGKTFTCGSKLVHERTHSNDKPYKYNECGEAFLWTTYSNEKIDTDETL

SEQ ID NO: 16078 - protein, 593 aa, Homo sapiens
MTMFKEAVTFKDVAVVFTEEELGLLDVSQRKLYRDVMLENFRNLLSVGHQLSHRDTFHFQREEKFWIMETATQREGNSGGKIQTELESVPETGPHEEWSCQQIWEQTASELTRPQDSISSSQFSTQGDVPSQVDAGLSIIHIGETPSEHGKCKKFFSDVSILDLHQQLHSGKISHTCNEYRKRFCYSSALCLHQKVHMGEKRYKCDVCSKAFSQNSQLQTHQRIHTGEKPFKCEQCGKSFSRRSGMYVHCKLHTGEKPHICEECGKAFIHNSQLREHQRIHTGEKPFKCYICGKSFHSRSNLNRHSMVHMQEKSFRCDTCSNSFGQRSALNSHCMDHTKEKLYKCEECGRSFTCRQDLCKHQMDHTGDKPYNCNVCGKGFRWSSCLSRHQRVHNGETTFKCDGCGKRFYMNSQGHSHQRAYREEELYKCQKCGKGYISKFNLDLHQRVHTGERPYNCKECGKSFRWASGILRHKRLHTGEKPFKCEECGKRFTENSKLRFHQRIHTGEKPYKCEECGKGFRWASTHLTHQRLHSREKLFQCEDCGKSSEHSSCLQDQQSDHSGEKTSKCEDCGKRYERRLNLDMILSLFLNDI

SEQ ID NO: 16079 - protein, 590 aa, Homo sapiens
MIKFQERVTFKDVAVVFTKEELALLDKAQINLYQDVMLENFRNLMLVRDGIKNNILNLQAKGLSYLSQEVLHCWQIWKQRIRDLTVSQDYIVNLQEECSPHLEDVSLSEEWAGISLQISENENYVVNAIIKNQDITAWQSLTQVLTPESWRKANIMTEPQNSQGRYKGIYMEEKLYRRAQHDDSLSWTSCDHHESQECKGEDPGRHPNCGKNLGMKSTVEKRNAAHVLPQPFPCNNCGVAFADDTDPHVHHSTHLGEKSYKCDQYGKNFSQSQDLIVHCKTHSGKTPYEFHEWPMGCKQSSDLPRYQKVSSGDKPYKCKECGKGFRRSSSLHNHHRVHTGEMPYKCDECGKGFGFRSLLCIHQGVHTGKKPYKCEECGKGFDQSSNLLVHQRVHTGEKPYKCSECGKCFSSSSVLQVHWRFHTGEKPYRCGECGKGFSQCTHLHIHQRVHTGEKPYKCNVCGKDFAYSSVLHTHQRVHTGEKPYKCEVCGKCFSYSSYFHLHQRDHIREKPYKCDECGKGFSRNSDLNVHLRVHTRERPYKCKACGKGFSRNSYLLAHQRVHIDETQYTHCERGKDLLTHQRLHEQRETL

SEQ ID NO: 16080 - protein, 521 aa, Homo sapiens
METDLAEMPEKGALSSQDSPHFQEKSTEEGEVAALRLTARSQETVTFKDVAMDFTPEEWGKLDPAQRDVMLENYRNLVSLWLPVSKPESYNLENGKEPLKLERKAPKSSYSDMETRPQSKDSTSVQDFSKAESCKVAIIDRLTRNSVYDSNLEAALECENWLENQQGNQERHLREMFTHMNSLSEETDHKHDVYWKSFNQKSVLITEDRVPKGSYAFHTLEKSLKQKSNLMKKQRTYKEKKPHKCNDCGELFTYHSVLIRHQRVHTGEKPYTCNECGKSFSHRANLTKHQRTHTRILFECSECKKTFTESSSLATHQRIHVGERPYECNECGKGFNRSTHLVQHQLIHTGVKPYECNECDKAFIHSSALIKHQRTHTGEKPYKCQECGKAFSHCSSLTKHQRVHTGEKPYECSECGKTFSQSTHLVQHQRIHTGEKPYECNECGKTFSRSSNFAKHQRIHIGKKPYKCSECGKAFIHSSALIQHQRTHTGEKPFRCNECGKSFKCSSSLIRHQRVHTEEQP

SEQ ID NO: 16081 - protein, 522 aa, Homo sapiens
METDLAEMPEKGVLSSQDSPHFQEKSTEEGEVAALRLTARSQAAAAAAAPGSRSLRGVHVPPPLHPAPAREEIKSTCSLKACFSLSLTLTYYRTAFLLSTENEGNLHFQCPSDVETRPQSKDSTSVQDFSKAESCKVAIIDRLTRNSVYDSNLEAALECENWLEKQQGNQERHLREMFTHMNSLSEETDHEHDVYWKSFNQKSVLITEDRVPKGSYAFHTLEKSLKQKSNLMKKQRTYKEKKPHKCNDCGELFTCHSVHIQHQRVHTGEKPYTCNECGKSFSHRANLTKHQRTHTRILFECRECKKTFTESSSLATHQRIHVGERPYECNECGKGFNRSTHLVQHQLIHTGVRPYECNECDKAFIHSSALIKHQRTHTGEKPYKCQECGKAFSHCSSLTKHQRVHTGEKPYECSECGKTFSQSTHLVQHQRIHTGEKPYECSECGKTFSQSSNFAKHQRIHIGKKPYKCSECGKAFIHSSALIQHQRTHTGEKPFRCNECGKSFKCSSSLIRHQRVHTEEQP

SEQ ID NO: 16082 - protein, 754 aa, Homo sapiens
MNSSSRSQILLRWKSDKAQSGPYNVEKEILTSRFLRDTETCRQNFRNFPYPDLAGPRKALSQLRELCLKWLRPEIHSKEQILELLVLEQFLTILPGEVRTWVKSQYPESSEEAVTLVEDLTQILEEEAPQNSTLSQDTPEEDPRGKHAFQTGWLNDLVTKESMTFKDVAVDITQEDWELMRPVQKELYKTVTLQNYWNMVSLGLTVYRPTVIPILEEPWMVIKEILEGPSPEWETKAQACTPVEDMSKLTKEETHTIKLEDSYDYDDRLERRGKGGFWKIHTDERGFSLKSVLSQEYDPTEECLSKYDIYRNNFEKHSNLIVQFDTQLDNKTSVYNEGRATFNHVSYGIVHRKILPGEKPYKCNVCGKKFRKYPSLLKHQSTHAKEKSYECEECGKEFRHISSLIAHQRMHTGEKPYECHQCGKAFSQRAHLTIHQRIHTGEKPYKCDDCGKDFSQRAHLTIHQRTHTGEKPYKCLECGKTFSHSSSLINHQRVHTGEKPYICNECGKTFSQSTHLLQHQKIHTGKKPYKCNECWKVFSQSTYLIRHQRIHSGEKCYKCNECGKAFAHSSTLIQHQTTHTGEKSYICNICGKAFSQSANLTQHHRTHTGEKPYKCSVCGKAFSQSVHLTQHQRIHNGEKPFKCNICGKAYRQGANLTQHQRIHTGEKPYKCNECGKAFIYSSSLNQHQRTHTGERPYKCNECDKDFSQRTCLIQHQRIHTGEKPYACRICGKTFTQSTNLIQHQRVHTGAKHRN

SEQ ID NO: 16083 - protein, 2723 aa, Homo sapiens
MADEEAEQERLSCGEGGCVAELQRLGERLQELELQLRESRVPAVEAATDYCQQLCQTLLEYAEKWKTSEDPLPLLEVYTVAIQSYVKARPYLTSECENVALVLERLALSCVELLLCLPVELSDKQWEQFQTLVQVAHEKLMENGSCELHFLATLAQETGVWKNPVLCTILSQEPLDKDKVNEFLAFEGPILLDMRIKHLIKTNQLSQATALAKLCSDHPEIGIKGSFKQTYLVCLCTSSPNGKLIEEISEVDCKDALEMICNLESEGDEKSALVLCTAFLSRQLQQGDMYCAWELTLFWSKLQQRVEPSIQVYLERCRQLSLLTKTVYHIFFLIKVINSETEGAGLATCIELCVKALRLESTENTEVKISICKTISCLLPDDLEVKRACQLSEFLIEPTVDAYYAVEMLYNQPDQKYDEENLPIPNSLRCELLLVLKTQWPFDPEFWDWKTLKRQCLALMGEEASIVSSIDELNDSEVYEKVVDYQEESKETSMNGLSGGVGANSGLLKDIGDEKQKKREIKQLRERGFISARFRNWQAYMQYCVLCDKEFLGHRIVRHAQKHYKDGIYSCPICAKNFNSKETFVPHVTLHVKQSSKERLAAMKPLRRLGRPPKITTTNENQKTNTVAKQEQRPIKKNSLYSTDFIVFNDNDGSDDENDDKDKSYEPEVIPVQKPVPVNEFNCPVTFCKKGFKYFKNLIAHVKGHKDNEDAKRFLEMQSKKVICQYCRRHFVSVTHLNDHLQMHCGSKPYICIQMKCKAGFNSYAELLTHRKEHQVFRAKCMFPKCGRIFSEAYLLYDHEAQHYNTYTCKFTGCGKVYRSQGELEKHLDDHSTPPEKVLPPEAQLNSSGDSIQPSEVNQNTAENIEKERSMLPSENNIENSLLADRSDAWDKSKAESAVTKQDQISASELRQANGPLSNGLENPATTPLLQSSEVAVSIKVSLNQGIEDNFGKQENSTVEGSGEALVTDLHTPVEDTCNDLCHPGFQERKEQDCFNDAHVTQNSLVNSETLKIGDLTPQNLERQVNNLMTFSVQNQAAFQNNLPTSKFECGDNVKTSSNLYNLPLKTLESIAFVPPQSDLSNSLGTPSVPPKAPVQKFSCQVEGCTRTYNSSQSIGKHMKTAHPDQYAAFKMQRKSKKGQKANNLNTPNNGKFVYFLPSPVNSSNPFFTSQTKANGNPACSAQLQHVSPPIFPAHLASVSTPLLSSMESVINPNITSQDKNEQGGMLCSQMENLPSTALPAQMEDLTKTVLPLNIDSGSDPFLPLPAESSSMSLFPSPADSGTNSVFSQLENNTNHYSSQIEGNTNSSFLKGGNGENAVFPSQVNVANNFSSTNAQQSAPEKVKKDRGRGPNGKERKPKHNKRAKWPAIIRDGKFICSRCYRAFTNPRSLGGHLSKRSYCKPLDGAEIAQELLQSNGQPSLLASMILSTNAVNLQQPQQSTFNPEACFKDPSFLQLLAENRSPAFLPNTFPRSGVTNFNTSVSQEGSEIIKQALETAGIPSTFEGAEMLSHVSTGCVSDASQVNATVMPNPTVPPLLHTVCHPNTLLTNQNRTSNSKTSSIEECSSLPVFPTNDLLLKTVENGLCSSSFPNSGGPSQNFTSNSSRVSVISGPQNTRSSHLNKKGNSASKRRKKVAPPLIAPNASQNLVTSDLTTMGLIAKSVEIPTTNLHSNVIPTCEPQSLVENLTQKLNNVNNQLFMTDVKENFKTSLESHTVLAPLTLKTENGDSQMMALNSCTTSINSDLQISEDNVIQNFEKTLEIIKTAMNSQILEVKSGSQGAGETSQNAQINYNIQLPSVNTVQNNKLPDSSPFSSFISVMPTKSNIPQSEVSHKEDQIQEILEGLQKLKLENDLSTPASQCVLINTSVTLTPTPVKSTADITVIQPVSEMINIQFNDKVNKPFVCQNQGCNYSAMTKDALFKHYGKIHQYTPEMILEIKKNQLKFAPFKCVVPTCTKTFTRNSNLRAHCQLVHHFTTEEMVKLKIKRPYGRKSQSENVPASRSTQVKKQLAMTEENKKESQPALELRAETQNTHSNVAVIPEKQLVEKKSPDKTESSLQVITVTSEQCNTNALTNTQTKGRKIRRHKKEKEEKKRKKPVSQSLEFPTRYSPYRPYRCVHQGCFAAFTIQQNLILHYQAVHKSDLPAFSAEVEEESEAGKESEETETKQTLKEFRCQVSDCSRIFQAITGLIQHYMKLHEMTPEEIESMTASVDVGKFPCDQLECKSSFTTYLNYVVHLEADHGIGLRASKTEEDGVYKCDCEGCDRIYATRSNLLRHIFNKHNDKHKAHLIRPRRLTPGQENMSSKANQEKSKSKHRGTKHSRCGKEGIKMPKTKRKKKNNLENKNAKIVQIEENKPYSLKRGKHVYSIKARNDALSECTSRFVTQYPCMIKGCTSVVTSESNIIRHYKCHKLSKAFTSQHRNLLIVFKRCCNSQVKETSEQEGAKNDVKDSDTCVSESNDNSRTTATVSQKEVEKNEKDEMDELTELFITKLINEDSTSVETQANTSSNVSNDFQEDNLCQSERQKASNLKRVNKEKNVSQNKKRKVEKAEPASAAELSSVRKEEETAVAIQTIEEHPASFDWSSFKPMGFEVSFLKFLEESAVKQKKNTDKDHPNTGNKKGSHSNSRKNIDKTAVTSGNHVCPCKESETFVQFANPSQLQCSDNVKIVLDKNLKDCTELVLKQLQEMKPTVSLKKLEVHSNDPDMSVMKDISIGKATGRGQY

SEQ ID NO: 16084 - protein, 475 aa, Homo sapiens
MSRRKAGSAPRRVEPAPAANPDDEMEMQDLVIELKPEPDAQPQQAPRLGPFSPKEVSSAGRFGGEPHHSPGPMPAGAALLALGPRNPWTLWTPLTPNYPDRQPWTDKHPDLLTCGRCLQTFPLEAITAFMDHKKLGCQLFRGPSRGQGSEREELKALSCLRCGKQFTVAWKLLRHAQWDHGLSIYQTESEAPEAPLLGLAEVAAAVSAVVGPAAEAKSPRASGSGLTRRSPTCPVCKKTLSSFSNLKVHMRSHTGERPYACDQCPYACAQSSKLNRHKKTHRQVPPQSPLMADTSQEQASAAPPEPAVHAAAPTSTLPCSGGEGAGAAATAGVQEPGAPGSGAQAGPGGDTWGAITTEQRTDPANSQKASPKKMPKSGGKSRGPGGSCEFCGKHFTNSSNLTVHRRSHTGERPYTCEFCNYACAQSSKLNRHRRMHGMTPGSTRFECPHCHVPFGLRATLDKHLRQKHPEAAGEA

SEQ ID NO: 16085 - protein, 446 aa, Homo sapiens
METQADLVSQEPQALLDSALPSKVPAFSDKDSLGDEMLAAALLKAKSQELVTFEDVAVYFIRKEWKRLEPAQRDLYRDVMLENYGNVFSLDRETRTENDQEISEDTRSHGVLLGRFQKDISQGLKFKEAYEREVSLKRPLGNSPGERLNRKMPDFGQVTVEEKLTPRGERSEKYNDFGNSFTVNSNLISHQRLPVGDRPHKCDECSKSFNRTSDLIQHQRIHTGEKPYECNECGKAFSQSSHLIQHQRIHTGEKPYECSDCGKTFSCSSALILHRRIHTGEKPYECNECGKTFSWSSTLTHHQRIHTGEKPYACNECGKAFSRSSTLIHHQRIHTGEKPYECNECGKAFSQSSHLYQHQRIHTGEKPYECMECGGKFTYSSGLIQHQRIHTGENPYECSECGKAFRYSSALVRHQRIHTGEKPLNGIGMSKSSLRVTTELNIREST

SEQ ID NO: 16086 - protein, 623 aa, Homo sapiens
MAHKYVGLQYHGSVTFEDVAIAFSQQEWESLDSSQRGLYRDVMLENYRNLVSMGHSRSKPHVIALLEQWKEPEVTVRKDGRRWCTDLQLEDDTIGCKEMPTSENCPSFALHQKISRQKPRECQEYGKTLCQDSKPVQHERIHSSEKPNRCKECGKNFSNGHQLTIHQRLHVGEKPYKYEKCGKAFISGSAFVKHGRIHTGEKPLKCKQCGKTISGSYQLTVHKSIHTGKKPYECGECGKAFLVYGKLTRHQSTHTGEKPFGCEECGKAFSTFSYLVQHQRIHTSEKPYECKECGKAFSTSSPLAKHQRIHTGEKPYECKECGKSFTVYGQLTRHQSIHTGEKPFECKECGKAFRLSSFLHAHQRIHAEIKPYGCKECGRTFSRASYLVQHGRLHTGEKPYECKECGKAFSTGSYLVQHQRIHTGEKPYECKECGKAFISRHQLTVHQRVHTGEKPYECKECGKAFRVHVHLTQHRKIHTDVKPYECKECGKTFSRASYLVQHSRIHTGKKPYECKECGKAFSSGSYLVQHQRIHTGEKPYECNKCGKAFTVYGQLIGHQSVHTGEKPFECKECGKAFRLNSFLTEHQRVHTGEKPFKCKKCGKTFRYSSALKVHLRKHMSVIP

SEQ ID NO: 16087 - protein, 604 aa, Homo sapiens
MMKSQGLVSFKDVAVDFTQEEWQQLDPSQRTLYRDVMLENYSHLVSMGYPVSKPDVISKLEQGEEPWIIKGDISNWIYPDEYQADGRQDRKSNLHNSQSCILGTVSFHHKILKGVTRDGSLCSILKVCQGDGQLQRFLENQDKLFRQVTFVNSKTVTEASGHKYNPLGKIFQECIETDISIQRFHKYDAFKKNLKPNIDLPSCYKSNSRKKPDQSFGGGKSSSQSEPNSNLEKIHNGVIPFDDNQCGNVFRNTQSLIQYQNVETKEKSCVCVTCGKAFAKKSQLIVHQRIHTGKKPYDCGACGKAFSEKFHLVVHQRTHTGEKPYDCSECGKAFSQKSSLIIHQRVHTGEKPYECSECGKAFSQKSPLIIHQRIHTGEKPYECRECGKAFSQKSQLIIHHRAHTGEKPYECTECGKAFCEKSHLIIHKRIHTGEKPYKCAQCEEAFSRKTELITHQLVHTGEKPYECTECGKTFSRKSQLIIHQRTHTGEKPYKCSECGKAFCQKSHLIGHQRIHTGEKPYICTECGKAFSQKSHLPGHQRIHTGEKPYICAECGKAFSQKSDLVLHQRIHTGERPYQCAICGKAFIQKSQLTVHQRIHTVVKS

SEQ ID NO: 16088 - protein, 478 aa, Homo sapiens
MSQVTFSDVAIDFSHEEWACLDSAQRDLYKDVMVQNYENLVSVGLSVTKPYVIMLLEDGKEPWMMEKKLSKAYPFPLSHSVPASVNFGFSALFEHCSEVTEIFELSELCVFWVLHFLSNSPNSTVEAFSRSKKKKKKKKKRQCFAFLIYFRLGIKMGKQGIINKEGYLYEDSPQPVTMEKVVKQSYEFSNSNKNLEYTECDTFRSTFHSKSTLSEPQNNSAEGNSHKYDILKKNLSKKSVIKSERINGGKKLLNSNKSGAAFNQSKSLTLPQTCNREKIYTCSECGKAFGKQSILSRHWRIHTGEKPYECRECGKTFSHGSSLTRHQISHSGEKPYKCIECGKAFSHGSSLTNHQSTHTGEKPYECMNCGKSFSRVSLLIQHLRIHTQEKRYECRICGKAFIHSSSLIHHQKSHTGEKPYECRECGKAFCCSSHLTQHQRIHSMKKKYECNKCLKVFSSFSFLVQHQSIHTEEKPFEV

SEQ ID NO: 16089 - protein, 659 aa, Homo sapiens
MAAAVLMDRVQSCVTFEDVFVYFSREEWELLEEAQRFLYRDVMLENFALVATLGFWCEAEHEAPSEQSVSVEGVSQVRTAESGLFQKAHPCEMCDPLLKDILHLAEHQGSHLTQKLCTRGLCRRRFSFSANFYQHQKQHNGENCFRGDDGGASFVKSCTVHMLGRSFTCREEGMDLPDSSGLFQHQTTYNRVSPCRRTECMESFPHSSSLRQHQGDYDGQMLFSCGDEGKAFLDTFTLLDSQMTHAEVRPFRCLPCGNVFKEKSALINHRKIHSGEISHVCKECGKAFIHLHHLKMHQKFHTGKRHYTCSECGKAFSRKDTLVQHQRVHTGERSYDCSECGKAYSRSSHLVQHQRIHTGERPYKCNKCGKAFSRKDTLVQHQRFHTGERPYECSECGKFFSQSSHLIEHWRIHTGARPYECIECGKFFSHNSSLIKHRRVHTGARSYVCSKCGKAFGCKDTLVQHQIIHTGARPYECSECGKAFSRKDTLVQHQKIHTGERPYECGECGKFFSHSSNLIVHQRIHTGAKPYECNECGKCFSHNSSLILHQRVHTGARPYVCSECGKAYISSSHLVQHKKVHTGARPYECSECGKFFSRNSGLILHQRVHTGEKPYVCSECGKAYSRSSHLVRHQKAHTGERAHECNSFGGPLAASLKLV

SEQ ID NO: 16090 - protein, 666 aa, Homo sapiens
MQEVVLLDESSGPPSQLLWTRQDTQLPQESALLPAPYPAFTKDGSQGNLPQADITLMSQAQESVTFEDVAVNFTNREWQCLTYAQRHLYKDVMLENYGNMVSLGFPFPKPPLISHLEREVDPCVQDPQDRESLSCSYPVSADKMWPENEKASSQQEIFENGEAYWMKFNSLLKVDSRDPKVREVCVQDVKLENQWETSIREKLREEKEGSEEVTCKKGKNQKVLSKNLNPNSKHSQCNKVLIAQKLHECARCGKNFSWHSDLILHEQIHSGEKPHVCNECGKAFKTRNQLSMHRIIHTGEKPFNCTQCGKAFNSRSALCRHKKTHSGEKPHECRDCGKAFKTRNRLCMHQLIHTGEKPYKCNCCGKAFQFKHSLTIHGRIHTGEKPYECEECGKAFSGSSDLTKHIRIHTGERPYECSKCGRAFSRSSDLSKHKRIHTREKHYGCPQCGKDFSIKAELTKHRRIHTEEKRYRCEECGKAFRHNCKRRAHEREHTGEKPYQCRDCGKTFQDKHCLTIHQRIHTGEKPYKCLECGKAFSGKSNLTNHRRIHTGEKPHKCEVCGMAFHHSSVLRQHKRIHTGEKPYTCSECGTSFRQGSALIGHKRVHTGEKPYECEECGKAFRVSSNLTGHKKRKHQVWSTHELDGSRKSLSPVTVSQTSVVSILTSA

SEQ ID NO: 16091 - protein, 1004 aa, Homo sapiens
MAALHTTPDSPAAQLERAEDGSECDPDQEEEEEEEEKGEEVQEVEEEEEEIVVEEEEEGVAEVVQDAQVEAVAEVEVEADVEEEDVKEVLAEEECPALGTQERLSRGGDAKSPVLQEKGLQASRAPATPRDEDLEEEEEEEEDEDEDDLLTAGCQELVTFEDVAVYFSLEEWERLEADQRGLYQEVMQENYGILVSLGYPIPKPDLIFRLEQGEEPWVPDSPRPEEGDIVTGVYTGAWFWTDDIEDHEEEDDEDFLAEVAEEENEPPGLWSAAYGVGDVPGTWGPDDSDSAQTPEGWGPDPGGLGVLADGSEAKPFLPGREPGANLLSPWAFPAAVAPPAGRPETTCDVCGKVFPHRSRLAKHQRYHAAVKPFGCEECGKGFVYRSHLAIHQRTHTGEKPFPCPDCGKRFVYKSHLVTHRRIHTGERPYRCAFCGAGFGRRSYLVTHQRTHTGERPYPCSHCGRSFSQSSALARHQAVHTADRPHCCPDCGQAFRLRADFQRHRRGGGCAEAGGDGPRREPGETAAAAGPEDTDPGPEGSEVGEADGEAEAAAEEREEAAVAAPTPSGKVDPAPERRFLELGNGLGEGEGPSSHPLGFHFPVHPKSWLHPDSFPILGLPDFRERLPVDGRPLPAPLGGPLSLVEGTGLACDPFGGGGAAGGGGGLRAFGPAIGGLLAEPAPAALAEEESPWICSDCGKTFGRRAALAKHQRYHAGERPHRCADCGKSFVYGSHLARHRRTHTGERPFPCPECGARFARGSHLAAHVRGHTGEKPFVCGVCGAGFSRRAHLTAHGRAHTGERPYACGECGRRFGQSAALTRHQWAHAEEKPHRCPDCGKGFGHSSDFKRHRRTHTGEKPFRCADCGRGFAQRSNLAKHRRGHTGERPFPCPECGKRFSQRSVLVTHQRTHTGERPYACANCGRRFSQSSHLLTHMKTHRGATAAPGSGSAPAPAPKPEAAAKGPSSAGPGERGSALLEFAGGTSFGSEHQAAFAGPSGAYREGVL

SEQ ID NO: 16092 - protein, 595 aa, Homo sapiens
MAALSPTFATSTQDSTCLQDSEFPVSSKDHSCPQNLDLFVCSGLEPHTPSVGSQESVTFQDVAVDFTEKEWPLLDSSQRKLYKDVMLENYSNLTSLGYQVGKPSLISHLEQEEEPRTEERGAHQGACADWETPSKTKWSLLMEDIFGKETPSGVTMERAGLGEKSTEYAHLFEVFGMDPHLTQPMGRHAGKRPYHRRDYGVAFKGRPHLTQHMSMYDGRKMHECHQCQKAFTTSASLTRHRRIHTGEKPYECSDCGKAFNDPSALRSHARTHLKEKPFDCSQCGNAFRTLSALKIHMRVHTGERPYKCDQCGKAYGRSCHLIAHKRTHTGERPYECHDCGKAFQHPSHLKEHVRNHTGEKPYACTQCGKAFRWKSNFNLHKKNHMVEKTYECKECGKSFGDLVSRRKHMRIHIVKKPVECRQCGKTFRNQSILKTHMNSHTGEKPYGCDLCGKAFSASSNLTAHRKIHTQERRYECAACGKVFGDYLSRRRHMSVHLVKKRVECRQCGKAFRNQSTLKTHMRSHTGEKPYECDHCGKAFSIGSNLNVHRRIHTGEKPYECLVCGKAFSDHSSLRSHVKTHRGEKLFVSSVWKRLQ

SEQ ID NO: 16093 - protein, 2279 aa, Homo sapiens
MYRSSARSSVSSHRPKDDGGGGPRSGRSSGSSSGPARRSSPPPPPSGSSSRTPARRPRSPSGHRGRRASPSPPRGRRVSPSPPRARRGSPSPPRGRRLFPPGPAGFRGSSRGESRADYARDGRGDHPGDSGSRRRSPGLCSDSLEKSLRITVGNDHFCVSTPERRRLSDRLGSPVDNLEDMDRDDLTDDSVFTRSSQCSRGLERYISQEEGPLSPFLGQLDEDYRTKETFLHRSDYSPHISCHDELLRGTERNREKLKGYSIRSEERSREAKRPRYDDTVKINSMGGDHPSFTSGTRNYRQRRRSPSPRFLDPEFRELDLARRKREEEEERSRSLSQELVGVDGGGTGCSIPGLSGVLTASEPGYSLHRPEEVSVMPKKSILKKRIEVDIMEPSMQLESFSSSTSSSQDHPLYSGHPSLPLSGAIAAFASEIENKGTMVETALKEPQGNLYQWGPLPGIPKDNSPLREKFGSFLCHKDNLDLKAEGPERHTDFLLPHERASQDGSGFSRILSMLADSTSTQEKRRRSFPDIEDEEKFLYGDEEEDLKAESVPKPLGSSESEVMRQKASSLPSSAPAVKLESLEETNPEYAKIHDLLKTIGLDIGVAEISQLAARTQERLHGKKPSLRSSADRRSSVDRYFSADHCSSVDHRFSADRCSSVDHCFSADRRSSDPHRLESREAHHSNTHSPEVSHPHPPSPVDPYLLTKNSPPFLKSDHPVGHISGPEVVGSGFQSSVAVRCMLPSAPSAPIRLPHTAALSQFHMPRASQFAAARIPPNYQGPAIPPASFDAYRHYMAYAASRWPMYPTSQPSNHPVPEPHRIMPITKQATRSRPNLRVIPTVTPDKPKQKESLRGSIPAAQVPVQVSIPSLIRYNPEKISDEKNRASQKQKVIEEREKLKNDREARQKKMYYLRTELERLHKQQGEMLRKKRREKDGHKDPLLVEVSRLQDNIMKDIAELRQEAEEAEKKQSELDKVAQILGINIFDKSQKSLSDSREPTEKPGKAEKSKSPEKVSSFSNSSSNKESKVNNEKFRTKSPKPAESPQSATKQLDQPTAAYEYYDAGNHWCKDCNTICGTMFDFFTHMHNKKHTQTLDPYNRPWASKTQSEAKQDAIKRTDKITVPAKGSEFLVPISGFYCQLCEEFLGDPISGEQHVKGHQHNEKYKKYVDENPLYEERRNLDRQAGLAVVLETERRRQSELKRKLSEKPKEEKKEKKAKAVKEVKEDDKVSEKLEDQLSEGRNSPEKAENKRNTGIKLQLKEEVKKESPTSSSFGKFSWKKPEKEEEKSSLVTPSISKEEILESSKDKEDGKTEAGKAKPIKIKLSGKTVVAHTSPWMPVVTTSTQTKIRPNLPIPSTVLRKSCSATMSKPAPLNTFLSIKSSGTTAKPLPVVKESSADLLLPPDIISKAFGGEEVILKGSPEEKVVLAEKSEPSHLPEQILPPPPPPPPPPPPPPPVIPHPAAPSAAQANAILAPVKSNPVVSQTLSPGFVGPNILNPVLPVAIMASAQPAAIPSDETAPGVSESDRDQTLFSVLVRPPPPLSSVFSEQAKKLEKRNSCLATANAKDLYDIFYSSGGKGAPETKGAPETKLSGGPLANGENSNLSRTKSSDTSSTSPLNSSASQEELHQDEGLVAAPIVSNSEKPIAKTLVALGKWSVVEHVGPKSTGSTYGFLQPLTRLCQSRPYETITPKTDTLAIWTSSSFQSDTSRDISPEKSELDLGEPGPPGVEPPPQLLDIQCKESQKLVEIHLRESVNQDKESQELRKSEDCRESEIETNTELKERVKELSEGIVDEGVSTSIGPHSIDDSNLNHGNRYMWEGEVKQPNLLMIDKEAEQSNKLMTGSETPSKVVIKLSPQACSFTKAKLDSFLSEARSLLNPQDTPVKISAPELLLHSPARSAMCLTGSPQEQGVSVVSEEGLENSAPESASRTSRYRSLKLKRERSKDFQVKKIYELAVWDENKKRPETWESPEKPKTEALELQDVHPELTVTIESKALEDFEATDLKVEELTALGNLGDMPVDFCTTRVSPAHRSPTVLCQKVCEENSVSPIGCNSSDPADFEPIPSFSGFPLDSPKTLVLDFETEGERNSPNPRSVRIPSPNILKTGLTENVDRGLGGLEGTHQALDLLAGGMMPEEVKESSQLDKQESLGLELKTINSAGLGPSPCLPDLVDFVTRTSGVQKDKLCSPLSEPGDPSKCSSLELGPLQLEISNASTTEVAILQVDDDSGDPLNLVKAPVSRSPPREQVIEDNMVPQGMPEQETTVGAIQDHTESSVHN

SEQ ID NO: 16094 - protein, 582 aa, Homo sapiens
MSESWQQPPQTQPQQPQPPQPQHHAEPPPALAEHTLPPGTAENPLGCAVYGILLQPDPGLQPPQHAPLQAAGEPGPKCGVCGHDLAHLSSPHEHQCLAGHDRSFQCTQCLKIFHQATDLLEHQCVQAEQKPFVCGVCKMGFSLLTSLAQHHSSHSGLVKCSICEKTYKPAEAAEPATTAAPSLPAAPAPSTVTPAEQADKPYSCPICQKPFKHLSELSRHERIHTGEKPYKCTLCDKSFSQSSHLVHHKRTHSSERPYKCAVCEKTFKHRSHLVRHMYAHSGEHHLFRCNVCELHFKESSELLQHPCTPSGERPFRCGECQKAFKRPSDLRQHERTHSAERPFKCDLCPMGFKQQYALMRHRRTHKTEEPFKCGLCEKGFGQPSHLLYHQHVHTLETLFKCPVCQKGFDQSAELLRHKCLPGAAERPFKCPVCNKAYKRASALQKHQLAHCAAAEKPLRCTLCERRFFSSSEFVQHRCDPAREKPLKCPDCEKRFKYASDLQRHRRVHTGEKPYKCPNCDKAFKQREHLNKHQGVHAREQQFKCVWCGERFLDVALLQEHSAQHSAAAAAAEGAYQVAACLP

SEQ ID NO: 16095 - protein, 273 aa, Homo sapiens
MFGFPTATLLDCHGRYAQNVAFFNVMTEAHHKYDHSEATGSSSWDIQNSFRREKLEQKSPDSKTLQEDSPGVRQRVYECQECGKSFRQKGSLTLHERIHTGQKPFECTHCGKSFRAKGNLVTHQRIHTGEKPYQCKECGKSFSQRGSLAVHERLHTGQKPYECAICQRSFRNQSNLAVHRRVHSGEKPYRCDQCGKAFSQKGSLIVHIRVHTGLKPYACTQCRKSFHTRGNCILHGKIHTGETPYLCGQCGKSFTQRGSLAVHQRSCSQRLTL

SEQ ID NO: 16096 - protein, 509 aa, Homo sapiens
MALSQGLLTFRDVAIEFSQEEWKCLDPAQRTLYRDVMLENYRNLVSLDISSKCMMNTLSSTGQGNTEVIHTGTLQRQASYHIGAFCSQEIEKDIHDFVFQWQEDETNDHEAPMTEIKKLTSSTDRYDQRHAGNKPIKGQLESRFHLHLRRHRRIHTGEKPYKCEECEKVFSCKSHLEIHRIIHTGEKPYKCKVCDKAFKHDSHLAKHTRIHRGDKHYTCNECGKVFDQKATLACHHRSHTGEKPYKCNECGKTFSQTSHLVYHHRLHTGEKPYKCNECGKTFARNSVLVIHKAVHTAEKPYKCNECGKVFKQRATLAGHRRVHTGEKPYRCEECDKVFSRKSHLERHRRIHTGEKPYKCKVCDKAFRSDSRLAEHQRVHTGERPYTCNECGKVFSTKAYLACHQKLHTGEKLYECEECDKVYIRKSHLERHRRIHTGEKPHKCGDCGKAFNSPSHLIRHQRIHTGQKSYKCHQCGKVFSLRSLLAEHQKIPFGDNCFKCNEYSKPSSIN

SEQ ID NO: 16097 - protein, 402 aa, Homo sapiens
MYTSEEKCNQRTQKRKIYNVCPRKGKKIFIHMHEIIQIDGHIYQCLECKQNFCENLALIMCERTHTGEKPYKCDMCEKTFVQSSDLTSHQRIHNYEKPYKCSKCEKSFWHHLALSGHQRTHAGKKFYTCDICGKNFGQSSDLLVHQRSHTGEKPYLCSECDKCFSRSTNLIRHRRTHTGEKPFKCLECEKAFSGKSDLISHQRTHTGERPYKCNKCEKSYRHRSAFIVHKRVHTGEKPYKCGACEKCFGQKSDLIVHQRVHTGEKPYKCLECMRSFTRSANLIRHQATHTHTFKCLEYEKSFNCSSDLIVHQRIHMEEKPHQWSACESGFLLGMDFVAQQKMRTQTEELHYKYTVCDKSFHQSSALLQHQTVHIGEKPFVCNVSEKGLELSPPHASEASQMS

SEQ ID NO: 16098 - protein, 553 aa, Homo sapiens
MAFEDVAVYFSQEEWGLLDTAQRALYRRVMLDNFALVASLGLSTSRPRVVIQLERGEEPWVPSGTDTTLSRTTYRRRNPGSWSLTEDRDVSGEWPRAFPDTPPGMTTSVFPVAGACHSVKSLQRQRGASPSRERKPTGVSVIYWERLLLGSGSGQASVSLRLTSPLRPPEGVRLREKTLTEHALLGRQPRTPERQKPCAQEVPGRTFGSAQDLEAAGGRGHHRMGAVWQEPHRLLGGQEPSTWDELGEALHAGEKSFECRACSKVFVKSSDLLKHLRTHTGERPYECAQCGKAFSQTSHLTQHQRIHSGETPYACPVCGKAFRHSSSLVRHQRIHTAEKSFRCSECGKAFSHGSNLSQHRKIHAGGRPYACAQCGRRFCRNSHLIQHERTHTGEKPFVCALCGAAFSQGSSLFKHQRVHTGEKPFACPQCGRAFSHSSNLTQHQLLHTGERPFRCVDCGKAFAKGAVLLSHRRIHTGEKPFVCTQCGRAFRERPALFHHQRIHTGEKTVRRSRASLHPQARSVAGASSEGAPAKETEPTPASGPAAVSQPAEV

SEQ ID NO: 16099 - protein, 544 aa, Homo sapiens
MTFEDVAVYFSQEEWGLLDTAQRALYRHVMLENFTLVTSLGLSTSRPRVVIQLERGEEPWVPSGKDMTLARNTYGRLNSGSWSLTEDRDVSGEWPRAFPDTPPGMTTSVFPVADACHSVKSLQRQPGASPSQERKPTGVSVIYWERLLLGSRSDQASISLRLTSPLRPPKSSRPREKTFTEYRVPGRQPRTPERQKPCAQEVPGRAFGNASDLKAASGGRDRRMGAAWQEPHRLLGGQEPSTWDELGEALHAGEKSFECRACSKVFVKSSDLLKHLRTHTGERPYECTQCGKAFSQTSHLTQHQRIHSGETPYACPVCGKAFRHSSSLVRHQRIHTAEKSFRCSECGKAFSHGSNLSQHRKIHAGGRPYACAQCGRRFCRNSHLIQHERTHTGEKPFVCALCGAAFSQGSSLFLHQRVHTGEKPFACAQCGRSFSRSSNLTQHQLLHTGERPFRCVDCGKGFAKGAVLLSHRRIHTGEKPFVCTQCGRAFRERPALLHHQRIHTTEKTNAAAPDCTPGPGFLQGHHRKVRRGGKPSPVLKPAKV

SEQ ID NO: 16100 - protein, 582 aa, Homo sapiens
MDFEDDYTHSACRNTYQGFNGMDRDYGPGSYGGMDRDYGHGSYGGQRSMDSYLNQSYGMDNHSGGGGGSRFGPYESYDSRSSLGGRDLYRSGYGFNEPEQSRFGGSYGGRFESSYRNSLDSFGGRNQGGSSWEAPYSRSKLRPGFMEDRGRENYSSYSSFSSPHMKPAPVGSRGRGTPAYPESTFGSRNYDAFGGPSTGRGRGRGHMGDFGSIHRPGIVVDYQNKSTNVTVAAARGIKRKMMQPFNKPSGTFIKKPKLAKPMEKISLSKSPTKTDPKNEEEEKRRIEARREKQRRRREKNSEKYGDGYRMAFTCSFCKFRTFEEKDIELHLESSSHQETLDHIQKQTKFDKVVMEFLHECMVNKFKKTSIRKQQTNNQTEVVKIIEKDVMEGVTVDDHMMKVETVHCSACSVYIPALHSSVQQHLKSPDHIKGKQAYKEQIKRESVLTATSILNNPIVKARYERFVKGENPFEIQDHSQDQQIEGDEEDEEKIDEPIEEEEDEDEEEEAEEVGEVEEVEEVEEVREGGIEGEGNIQGVGEGGEVGVVGEVEGVGEVEEVEELEEETAKEEPADFPVEQPEEN

SEQ ID NO: 16101 - protein, 541 aa, Homo sapiens
MRLKMTTRNFPEREVPCDVEVERFTREVPCLSSLGDGWDCENQEGHLRQSALTLEKPGTQEAICEYPGFGEHLIASSDLPPSQRVLATNGFHAPDSNVSGLDCDPALPSYPKSYADKRTGDSDACGKGFNHSMEVIHGRNPVREKPYKYPESVKSFNHFTSLGHQKIMKRGKKSYEGKNFENIFTLSSSLNENQRNLPGEKQYRCTECGKCFKRNSSLVLHHRTHTGEKPYTCNECGKSFSKNYNLIVHQRIHTGEKPYECSKCGKAFSDGSALTQHQRIHTGEKPYECLECGKTFNRNSSLILHQRTHTGEKPYRCNECGKPFTDISHLTVHLRIHTGEKPYECSKCGKAFRDGSYLTQHERTHTGEKPFECAECGKSFNRNSHLIVHQKIHSGEKPYECKECGKTFIESAYLIRHQRIHTGEKPYGCNQCQKLFRNIAGLIRHQRTHTGEKPYECNQCGKAFRDSSCLTKHQRIHTKETPYQCPECGKSFKQNSHLAVHQRLHSREGPSRCPQCGKMFQKSSSLVRHQRAHLGEQPMET

SEQ ID NO: 16102 - protein, 463 aa, Homo sapiens
MAQGLVTFADVAIDFSQEEWACLNSAQRDLYWDVMLENYSNLVSLDLESAYENKSLPTEKNIHEIRASKRNSDRRSKSLGRNWICEGTLERPQRSRGRYVNQMIINYVKRPATREGTPPRTHQRHHKENSFECKDCGKAFSRGYQLSQHQKIHTGEKPYECKECKKAFRWGNQLTQHQKIHTGEKPYECKDCGKAFRWGSSLVIHKRIHTGEKPYECKDCGKAFRRGDELTQHQRFHTGEKDYECKDCGKTFSRVYKLIQHKRIHSGEKPYECKDCGKAFICGSSLIQHKRIHTGEKPYECQECGKAFTRVNYLTQHQKIHTGEKPHECKECGKAFRWGSSLVKHERIHTGEKPYKCTECGKAFNCGYHLTQHERIHTGETPYKCKECGKAFIYGSSLVKHERIHTGVKPYGCTECGKSFSHGHQLTQHQKTHSGAKSYECKECGKACNHLNHLREHQRIHNS

SEQ ID NO: 16103 - protein, 665 aa, Homo sapiens
MESVTFEDVAVEFIQEWALLDSARRSLCKYRMLDQCRTLASRGTPPCKPSCVSQLGQRAEPKATERGILRATGVAWESQLKPEELPSMQDLLEEASSRDMQMGPGLFLRMQLVPSIEERETPLTREDRPALQEPPWSLGCTGLKAAMQIQRVVIPVPTLGHRNPWVARDSAVPARDPAWLQEDKVEEEAMAPGLPTACSQEPVTFADVAVVFTPEEWVFLDSTQRSLYRDVMLENYRNLASVADQLCKPNALSYLEERGEQWTTDRGVLSDTCAEPQCQPQEAIPSQDTFTEILSIDVKGEQPQPGEKLYKYNELEKPFNSIEPLFQYQRIHAGEASCECQEIRNSFFQSAHLIVPEKIRSGDKSYACNKCEKSFRYSSDLIRHEKTHTAEKCFDCQECGQAFKYSSNLRRHMRTHTGEKPFECSQCGKTFTRNFNLILHQRNHTGEKPYECKDCGKAFNQPSSLRSHVRTHTGEKPFECSQCGKAFREHSSLKTHLRTHTREKPYECNQCGKPFRTSTHLNVHKRIHTGEKLYECATCGQVLSRLSTLKSHMRTHTGEKPYVCQECGRAFSEPSSLRKHARTHSGKKPYACQECGRAFGQSSHLIVHVRTHSAGRPYQCNQCEKAFRHSSSLTVHKRTHVGRETIRNGSLPLSMSHPYCGPLAN

SEQ ID NO: 16104 - protein, 680 aa, Homo sapiens
MKMKKFQIPVSFQDLTVNFTQEEWQQLDPAQRLLYRDVMLENYSNLVSVGYHVSKPDVIFKLEQGEEPWIVEEFSNQNYPDIDDALEKNKEIQDKHLTQTVFFSNKTLITERENVFGKTLNLGMNSVPSRKMPYKCNPGGNSLKTNSEVIVAKKSKENRKIPDGYSGFGKHEKSHLGMKKYRYNPMRKASNQNENLILHQNIQILKQPFDYNKCGKTFFKRAILITQKGRQTERKPNECNECRKTFSKRSTLIVHQRIHTGEKPYVCSDCRKTFRVKTSLTRHRRIHTGERPYECSECRKTFIDKSALIVHQKIHGGEKSYECNECGKTFFRKSALAEHFRSHTGEKPYECKECGNAFSKKSYLVVHQRTHRGEKPNECKECGKTFFCQSALTAHQRIHTGEKPYECSECEKTFFCQSALNVHRRSHTGEKPYECSQCGKFLCTKSALIAHQITHRGKKSYECNECGKFFCHKSTLTIHQRTHTGEKHGVFNKCGRISIVKSNCSQCKRMNTKENLYECSEHGHAVSKNSHLIVHQRTIWERPYECNECGRTYCRKSALTHHQRTHTGQRPYECNECGKTFCQKFSFVEHQRTHTGEKPYECNECGKSFCHKSAFRVHRRIHTGEKPYECNQCGKTYRRLWTLTEHQKIHTGEKPYECNKCEKTFRHKSNFLLHQKSHKE

SEQ ID NO: 16105 - protein, 1342 aa, Homo sapiens
MEENEVESSSDAAPGPGRPEEPSESGLGVGTSEAVSADSSDAAAAPGQAEADDSGVGQSSDRGSRSQEEVSESSSSADPLPNSYLPDSSSVSHGPVAGVTGGPPALVHSSALPDPNMLVSDCTASSSDLGSAIDKIIESTIGPDLIQNCITVTSAEDGGAETTRYLILQGPDDGAPMTSPMSSSTLAHSLAAIEALADGPTSTSTCLEAQGGPSSPVQLPPASGAEEPDLQSLEAMMEVVVVQQFKCKMCQYRSSTKATLLRHMRERHFRPVAAAAAAAGKKGRLRKWSTSTKSQEEEGPEEEDDDDIVDAGAIDDLEEDSDYNPAEDEPRGRQLRLQRPTPSTPRPRRRPGRPRKLPRLEISDLPDGVEGEPLVSSQSGQSPPEPQDPEAPSSSGPGHLVAMGKVSRTPVEAGVSQSDAENAAPSCPDEHDTLPRRRGRPSRRFLGKKYRKYYYKSPKPLLRPFLCRICGSRFLSHEDLRFHVNSHEAGDPQLFKCLQCSYRSRRWSSLKEHMFNHVGSKPYKCDECSYTSVYRKDVIRHAAVHSRDRKKRPDPTPKLSSFPCPVCGRVYPMQKRLTQHMKTHSTEKPHMCDKCGKSFKKRYTFKMHLLTHIQAVANRRFKCEFCEFVCEDKKALLNHQLSHVSDKPFKCSFCPYRTFREDFLLSHVAVKHTGAKPFACEYCHFSTRHKKNLRLHVRCRHASSFEEWGRRHPEEPPSRRRPFFSLQQIEELKQQHSAAPGPPPSSPGPPEIPPEATTFQSSEAPSLLCSDTLGGATIIYQQGAEESTAMATQTALDLLLNMSAQRELGGTALQVAVVKSEDVEAGLASPGGQPSPEGATPQVVTLHVAEPGGGAAAESQLGPPDLPQITLAPGPFGGTGYSVITAPPMEEGTSAPGTPYSEEPAGEAAQAVVVSDTLKEAGTHYIMATDGTQLHHIELTADGSISFPSPDALASGAKWPLLQCGGLPRDGPEPPSPAKTHCVGDSQSSASSPPATSKALGLAVPPSPPSAATAASKKFSCKICAEAFPGRAEMESHKRAHAGPGAFKCPDCPFSARQWPEVRAHMAQHSSLRPHQCSQCSFASKNKKDLRRHMLTHTKEKPFACHLCGQRFNRNGHLKFHIQRLHSPDGRKSGTPTARAPTQTPTQTIILNSDDETLATLHTALQSSHGVLGPERLQQALSQEHIIVAQEQTVTNQEEAAYIQEITTADGQTVQHLVTSDNQVQYIISQDGVQHLLPQEYVVVPEGHHIQVQEGQITHIQYEQGAPFLQESQIQYVPVSPGQQLVTQAQLEAAAHSAVTAVADAAMAQAQGLFGTDETVPEHIQQLQHQGIEYDVITLADD

SEQ ID NO: 16106 - protein, 751 aa, Homo sapiens
MGPQGARRQAFLAFGDVTVDFTQKEWRLLSPAQRALYREVTLENYSHLVSLGILHSKPELIRRLEQGEVPWGEERRRRPGPCAGIYAEHVLRPKNLGLAHQRQQQLQFSDQSFQSDTAEGQEKEKSTKPMAFSSPPLRHAVSSRRRNSVVEIESSQGQRENPTEIDKVLKGIENSRWGAFKCAERGQDFSRKMMVIIHKKAHSRQKLFTCRECHQGFRDESALLLHQNTHTGEKSYVCSVCGRGFSLKANLLRHQRTHSGEKPFLCKVCGRGYTSKSYLTVHERTHTGEKPYECQECGRRFNDKSSYNKHLKAHSGEKPFVCKECGRGYTNKSYFVVHKRIHSGEKPYRCQECGRGFSNKSHLITHQRTHSGEKPFACRQCKQSFSVKGSLLRHQRTHSGEKPFVCKDCERSFSQKSTLVYHQRTHSGEKPFVCRECGQGFIQKSTLVKHQITHSEEKPFVCKDCGRGFIQKSTFTLHQRTHSEEKPYGCRECGRRFRDKSSYNKHLRAHLGEKRFFCRDCGRGFTLKPNLTIHQRTHSGEKPFMCKQCEKSFSLKANLLRHQWTHSGERPFNCKDCGRGFILKSTLLFHQKTHSGEKPFICSECGQGFIWKSNLVKHQLAHSGKQPFVCKECGRGFNWKGNLLTHQRTHSGEKPFVCNVCGQGFSWKRSLTRHHWRIHSKEKPFVCQECKRGYTSKSDLTVHERIHTGERPYECQECGRKFSNKSYYSKHLKRHLREKRFCTGSVGEASS

SEQ ID NO: 16107 - protein, 810 aa, Homo sapiens
MNKVEQKSQESVSFKDVTVGFTQEEWQHLDPSQRALYRDVMLENYSNLVSVGYCVHKPEVIFRLQQGEEPWKQEEEFPSQSFPVWTADHLKERSQENQSKHLWEVVFINNEMLTKEQGDVIGIPFNVDVSSFPSRKMFCQCDSCGMSFNTVSELVISKINYLGKKSDEFNACGKLLLNIKHDETHTQEKNEVLKNRNTLSHHEETLQHEKIQTLEHNFEYSICQETLLEKAVFNTQKRENAEENNCDYNEFGRTLCDSSSLLFHQISPSRDNHYEFSDCEKFLCVKSTLSKPHGVSMKHYDCGESGNNFRRKLCLSHLQKGDKGEKHFECNECGKAFWEKSHLTRHQRVHTGQKPFQCNECEKAFWDKSNLTKHQRSHTGEKPFECNECGKAFSHKSALTLHQRTHTGEKPYQCNACGKTFCQKSDLTKHQRTHTGLKPYECYECGKSFRVTSHLKVHQRTHTGEKPFECLECGKSFSEKSNLTQHQRIHIGDKSYECNACGKTFYHKSLLTRHQIIHTGWKPYECYECGKTFCLKSDLTVHQRTHTGQKPFACPECGKFFSHKSTLSQHYRTHTGEKPYECHECGKIFYNKSYLTKHNRTHTGEKPYECNECGKAFYQKSQLTQHQRIHIGEKPYKCNECGKAFCHKSALIVHQRTHTQEKPYKCNECGKSFCVKSGLIFHERKHTGEKPYECNECGKFFRHKSSLTVHHRAHTGEKSCQCNECGKIFYRKSELAQHQRSHTGEKPYECNTCRKTFSQKSNLIVHQRRHIGENLMNEMDIRNFQPQVSLHNASEYSHCGESPDDILNVQ

SEQ ID NO: 16108 - protein, 778 aa, Homo sapiens
MNKVDQKFQGSVSFKDVTVGFTQEEWQHLDPSQRALYRDVMLENYSNLVSVGYCAHKPEVIFRLEQGEEPWRLEEEFPSQSFPEVWTADHLKERSQENQSKHLWEVVFINNEMLTKEQGNVIGIPFNMDVSSFPSRKMFCQYDSRGMSFNTVSELVISKINYLGKKSDEFNACGKLLLNIKHDETHTREKNEVLKNRNTLSHRENTLQHEKIQTLDHNFEYSICQETLLEKAVFNTRKRENAEENNCDYNEFGRTFCDSSSLLFHQIPPSKDSHYEFSDCEKFLCVKSTLSKHDGVPVKHYDCGESGNNFRRKLCLSQLQKGDKGEKHFECNECGKAFWEKSHLTRHQRVHTGEKHFQCNQCGKTFWEKSNLTKHQRSHTGEKPFECNECGKAFSHKSALTLHQRTHTGEKPYQCNACGKTFYQKSDLTKHQRTHTGQKPYECYECGKSFCMNSHLTVHQRTHTGEKPFECLECGKSFCQKSHLTQHQRTHIGDKPYECNACGKTFYHKSVLTRHQIIHTGLKPYECYECGKTFCLKSDLTIHQRTHTGEKPFACPECGKFFSHKSTLSQHYRTHTGEKPYECHECGKIFYNKSYLTKHNRTHTGEKPYECNECGKTFCQKSQLTQHQRIHIGEKPYECNECGKAFCHKSALIVHQRTHTQEKPYKCNECGKSFCVKSGLILHERKHTGEKPYECNECGKSFSHKSSLTVHHRAHTGEKSCQCNECGKIFYRKSDLAKHQRSHTGEKPYECNTCRKTFSQKSNLIVHQRTHIGEKPYE

SEQ ID NO: 16109 - protein, 560 aa, Homo sapiens; identical to SEQ ID NO: 14419

SEQ ID NO: 16110 - protein, 854 aa, Homo sapiens
MAQAIFEALEGMDNQTVLAVQSLLDGQGAVPDPTGQSVNAPPAIQPLDDEDVFLCGKCKKQFNSLPAFMTHKREQCQGNAPALATVSLATNSIYPPSAAPTAVQQAPTPANRQISTYITVPPSPLIQTLVQGNILVSDDVLMSAMSAFTSLDQPMPQGPPPVQSSLNMHSVPSYLTQPPPPPPPPPPLPPPPPPQPPPPPPQSLGPPGRPNPGGNGVVEVYSAAAPLAGSGTVEIQALGMQPYPPLEVPNQCVEPPVYPTPTVYSPGKQGFKPKGPNPAAPMTSATGGTVATFDSPATLKTRRAKGARGLPEAAGKPKAQKLKCSYCDKSFTKNFDLQQHIRSHTGEKPFQCIACGRAFAQKSNVKKHMQTHKVWPPGHSGGTVSRNSVTVQVMALNPSRQEDEESTGLGQPLPGAPQPQALSTAGEEEGDKPESKQVVLIDSSYLCQFCPSKFSTYFQLKSHMTQHKNEQVYKCVVKSCAQTFPKLDTFLEHIKSHQEELSYRCHLCGKDFPSLYDLGVHQYSHSLLPQHSPKKDNAVYKCVKCVNKYSTPEALEHHLQTATHNFPCPHCQKVFPCERYLRRHLPTHGSGGRFKCQVCKKFFRREHYLKLHAHIHSGEKPYKCSVCESAFNRKDKLKRHMLIHEPFKKYKCPFSTHTGCSKEFNRPDKLKAHILSHSGMKLHKCALCSKSFSRRAHLAEHQRAHTGNYKFRCAGCAKGFSRHKYLKDHRCRLGPQKDKDLQTRRPPQRRAAPRSCGSGGRKVLTPLPDPLGLEELKDTGAGLVPEAVPGKPPFAEPDAVLSIVVGGAVGAETELVVPGHAEGLGSNLALAELQAGAEGPCAMLAVPVYIQASE

SEQ ID NO: 16111 - protein, 599 aa, Homo sapiens
MMLPYPSALGDQYWEEILLPKNGENVETMKKLTQNHKAKGLPSNDTDCPQKKEGKAQIVVPVTFRDVTVIFTEAEWKRLSPEQRNLYKEVMLENYRNLLSLAEPKPEIYTCSSCLLAFSCQQFLSQHVLQIFLGLCAENHFHPGNSSPGHWKQQGQQYSHVSCWFENAEGQERGGGSKPWSARTEERETSRAFPSPLQRQSASPRKGNMVVETEPSSAQRPNPVQLDKGLKELETLRFGAINCREYEPDHNLESNFITNPRTLLGKKPYICSDCGRSFKDRSTLIRHHRIHSMEKPYVCSECGRGFSQKSNLSRHQRTHSEEKPYLCRECGQSFRSKSILNRHQWTHSEEKPYVCSECGRGFSEKSSFIRHQRTHSGEKPYVCLECGRSFCDKSTLRKHQRIHSGEKPYVCRECGRGFSQNSDLIKHQRTHLDEKPYVCRECGRGFCDKSTLIIHERTHSGEKPYVCGECGRGFSRKSLLLVHQRTHSGEKHYVCRECRRGFSQKSNLIRHQRTHSNEKPYICRECGRGFCDKSTLIVHERTHSGEKPYVCSECGRGFSRKSLLLVHQRTHSGEKHYVCRECGRGFSHKSNLIRHQRTH

SEQ ID NO: 16112 - protein, 488 aa, Homo sapiens
MENLTKHSIECSSFRGDWECKNQFERKQGSQEGHFSEMIFTPEDMPTFSIQHQRIHTDEKLLECKECGKDFSFVSVLVRHQRIHTGEKPYECKECGKAFGSGANLAYHQRIHTGEKPFECKECGKAFGSGSNLTHHQRIHTGEKPYECKECGKAFSFGSGLIRHQIIHSGEKPYECKECGKSFSFESALIRHHRIHTGEKPYECIDCGKAFGSGSNLTQHRRIHTGEKPYECKACGMAFSSGSALTRHQRIHTGEKPYICNECGKAFSFGSALTRHQRIHTGEKPYVCKECGKAFNSGSDLTQHQRIHTGEKPYECKECEKAFRSGSKLIQHQRMHTGEKPYECKECGKTFSSGSDLTQHHRIHTGEKPYECKECGKAFGSGSKLIQHQLIHTGERPYECKECGKSFSSGSALNRHQRIHTGEKPYECKECGKAFYSGSSLTQHQRIHTGEKLYECKNCGKAYGRDSEFQQHKKSHNGKKLCELETIN

SEQ ID NO: 16113 - protein, 294 aa, Homo sapiens
MEYPAPATVQAADGGAAGPYSSSELLEGQEPDGVRFDRERARRLWEAVSGAQPVGREEVEHMIQKNQCLFTNTQCKVCCALLISESQKLAHYQSKKHANKVKRYLAIHGMETLKGETKKLDSDQKSSRSKDKNQCCPICNMTFSSPVVAQSHYLGKTHAKNLKLKQQSTKVEALHQNREMIDPDKFCSLCHATFNDPVMAQQHYVGKKHRKQETKLKLMARYGRLADPAVTDFPAGKGYPCKTCKIVLNSIEQYQAHVSGFKHKNQSPKTVASSLGQIPMQRQPIQKDSTTLED

SEQ ID NO: 16114 - protein, 839 aa, Homo sapiens
MALTQGQVTFRDVAIEFSQEEWTCLDPAQRTLYRDVMLENYRNLASLGISCFDLSIISMLEQGKEPFTLESQVQIAGNPDGWEWIKAVITALSSEFVMKDLLHKGKSNTGEVFQTVMLERQESQDIEGCSFREVQKNTHGLEYQCRDAEGNYKGVLLTQEGNLTHGRDEHDKRDARNKLIKNQLGLSLQSHLPELQLFQYEGKIYECNQVEKSFNNNSSVSPPQQMPYNVKTHISKKYLKDFISSLLLTQGQKANNWGSPYKSNGCGMVFPQNSHLASHQRSHTKEKPYKCYECGKAFRTRSNLTTHQVIHTGEKRYKCNECGKVFSRNSQLSQHQKIHTGEKPYKCNECGKVFTQNSHLVRHRGIHTGEKPYKCNECGKAFRARSSLAIHQATHSGEKPYKCNECGKVFTQNSHLTNHWRIHTGEKPYKCNECGKAFGVRSSLAIHLVIHTGEKPYKCHECGKVFRRNSHLARHQLIHTGEKPYKCNECGKAFRAHSNLTTHQVIHTGEKPYKCNECGKVFTQNSHLANHQRIHTGVKPYMCNECGKAFSVYSSLTTHQVIHTGEKPYKCNECGKVFTQNSHLARHRGIHTGEKPYKCNECGKVFRHNSYLSRHQRIHTGEKPYKYNEYGKAFSEHSNLTTHQVIHTGEKPYKCNECGKVFTQNSHLARHRRVHTGGKPYQCNECGKAFSQTSKLARHQRVHTGEKPYECNQCGKAFSVRSSLTTHQAIHTGKKPYKCNECGKVFTQNSHLARHRGIHTGEKPYKCNECGKAFSQTSKLARHQRIHTGEKPYECGKPFSICSSLTTHQTIHTGGKPYKCNVWKVLKSEFKPCKPSQNS

SEQ ID NO: 16115 - protein, 527 aa, Homo sapiens
MTAELREAMALAPWGPVKVKKEEEEEENFPGQASSQQVHSENIKVWAPVQGLQTGLDGSEEEEKGQNISWDMAVVLKATQEAPAASTLGSYSLPGTLAKSEILETHGTMNFLGAETKNLQLLVPKTEICEEAEKPLIISERIQKADPQGPELGEACEKGNMLKRQRIKREKKDFRQVIVNDCHLPESFKEEENQKCKKSGGKYSLNSGAVKNPKTQLGQKPFTCSVCGKGFSQSANLVVHQRIHTGEKPFECHECGKAFIQSANLVVHQRIHTGQKPYVCSKCGKAFTQSSNLTVHQKIHSLEKTFKCNECEKAFSYSSQLARHQKVHITEKCYECNECGKTFTRSSNLIVHQRIHTGEKPFACNDCGKAFTQSANLIVHQRSHTGEKPYECKECGKAFSCFSHLIVHQRIHTAEKPYDCSECGKAFSQLSCLIVHQRIHSGDLPYVCNECGKAFTCSSYLLIHQRIHNGEKPYTCNECGKAFRQRSSLTVHQRTHTGEKPYECEKCGAAFISNSHLMRHHRTHLVE

SEQ ID NO: 16116 - protein, 532 aa, Homo sapiens
MIQAQESITLEDVAVDFTWEEWQLLGAAQKDLYRDVMLENYSNLVAVGYQASKPDALFKLEQGEQLWTIEDGIHSGACSDIWKVDHVLERLQSESLVNRRKPCHEHDAFENIVHCSKSQFLLGQNHDIFDLRGKSLKSNLTLVNQSKGYEIKNSVEFTGNGDSFLHANHERLHTAIKFPASQKLISTKSQFISPKHQKTRKLEKHHVCSECGKAFIKKSWLTDHQVMHTGEKPHRCSLCEKAFSRKFMLTEHQRTHTGEKPYECPECGKAFLKKSRLNIHQKTHTGEKPYICSECGKGFIQKGNLIVHQRIHTGEKPYICNECGKGFIQKTCLIAHQRFHTGKTPFVCSECGKSCSQKSGLIKHQRIHTGEKPFECSECGKAFSTKQKLIVHQRTHTGERPYGCNECGKAFAYMSCLVKHKRIHTREKQEAAKVENPPAERHSSLHTSDVMQEKNSANGATTQVPSVAPQTSLNISGLLANRNVVLVGQPVVRCAASGDNRGFAQDRNLVNAVNVVVPSVINYVLFYVTENP

SEQ ID NO: 16117 - protein, 605 aa, Homo sapiens
MAAGQREARPQVSLTFEDVAVLFTRDEWRKLAPSQRNLYRDVMLENYRNLVSLGLPFTKPKVISLLQQGEDPWEVEKDGSGVSSLGSKSSHKTTKSTQTQDSSFQGLILKRSNRNVPWDLKLEKPYIYEGRLEKKQDKKGSFQIVSATHKKIPTIERSHKNTELSQNFSPKSVLIRQQILPREKTPPKCEIQGNSLKQNSQLLNQPKITADKRYKCSLCEKTFINTSSLRKHEKNHSGEKLFKCKECSKAFSQSSALIQHQITHTGEKPYICKECGKAFTLSTSLYKHLRTHTVEKSYRCKECGKSFSRRSGLFIHQKIHAEENPCKYNPGRKASSCSTSLSGCQRIHSRKKSYLCNECGNTFKSSSSLRYHQRIHTGEKPFKCSECGRAFSQSASLIQHERIHTGEKPYRCNECGKGFTSISRLNRHRIIHTGEKFYNCNECGKALSSHSTLIIHERIHTGEKPCKCKVCGKAFRQSSALIQHQRMHTGERPYKCNECGKTFRCNSSLSNHQRIHTGEKPYRCEECGISFGQSSALIQHRRIHTGEKPFKCNTCGKTFRQSSSRIAHQRIHTGEKPYECNTCGKLFNHRSSLTNHYKIHIEEDP

SEQ ID NO: 16118 - protein, 612 aa, Homo sapiens
MAAGQREARPQVSLTFEDVAVLFTWDEWRKLAPSQRNLYRDVMLENYRNLVSLGLSFTKPKVISLLQQGEDPWEVEKDSSGVSSLGCKSTPKMTKSTQTQDSFQEQIRKRLKRDEPWNFISERSCIYEEKLKKQQDKNENLQIISVAHTKILTVDRSHKNVEFGQNFYLKSVFIKQQRFAKEKTPSKCEIQRNSFKQNSNLLNQSKIKTAEKRYKCSTCEKAFIHNSSLRKHQKNHTGEKLFKCKECLKAFSQSSALIQHQRTHTGEKPYICKECGKAFSHSASLCKHLRTHTVEKCYRCKECGKSFSRRSGLFIHQKIHAQENPHKYNPGRKASSYSTSLSGSQKIHLRKKSYLCNECGNTFKSSSSLRYHQRIHTGEKPFKCSECGRAFSQSASLIQHERIHTGEKPYRCNECGKGFTSISRLNRHRIIHTGEKLYNCNECGKALSSHSTLIIHERIHTGEKPCKCKVCGKAFRQSSALIQHQRMHTGERPYKCNECDKTFRCNSSLSNHQRIHTGEKPYRCLECGMSFGQSAALIQHQRIHTGEKPFKCNTCGKTFRQSSSLIAHQRIHTGEKPYECNACGKLFSQRSSLTNHYKIHIEEDSLKADLHV

SEQ ID NO: 16119 - protein, 554 aa, Homo sapiens [sequence omitted]

SEQ ID NO: 16120 - protein, 428 aa, Homo sapiens
MRDEVAEKEKADINVTLVFQGYENTPIMVCVDGIVFSKPDLVTCLEQRKKPWSMKHPGLTQHNIVHTGDKPYKCKDCGKIFKWSSNLTIHQRIHSGEKPYKCEECGKAFKQSSKLNEHMRAHTGEKFYKCEECGKAFKHPSGLTLHKRIHTGENPYKFEECDKAFYWVLSFTKHMIIHRGEKPYKYQECGKAFKWSSNLTIHKRIHTGEKPCKCEECGKACKQSLGLTIQKRIHTEEKPYKCEECGSSNLTIYKKIHAGEKPYNCEKCGKAFYCSSNLIQNNIVHAEEKHYKCQECGKAFKKSLDLNVHKIIHSGEKPYRYEECGKITHSGEESYKCEECGKGFYCSSSLTKHMIVHTEEKLYKCEECGKAFKWSSELTIHQRIRTEEKPYKCEECVRVFKHSSKLNEHKRNHTGEKPYKCEACGKAF

SEQ ID NO: 16121 - protein, 568 aa, Homo sapiens
MRRSVLVRNPGHKGLRPVYEELDSDSEDLDPNPEDLDPVSEDPEPDPEDLNTVPEDVDPSYEDLEPVSEDLDPDAEAPGSEPQDPDPMSSSFDLDPDVIGPVPLILDPNSDTLSPGDPKVDPISSGLTATPQVLATSPAVLPAPASPPRPFSCPDCGRAFRRSSGLSQHRRTHSGEKPYRCPDCGKSFSHGATLAQHRGIHTGARPYQCAACGKAFGWRSTLLKHRSSHSGEKPHHCPVCGKAFGHGSLLAQHLRTHGGPRPHKCPVCAKGFGQGSALLKHLRTHTGERPYPCPQCGKAFGQSSALLQHQRTHTAERPYRCPHCGKAFGQSSNLQHHLRIHTGERPYACPHCSKAFGQSSALLQHLHVHSGERPYRCQLCGKAFGQASSLTKHKRVHEGAAAAAAAAAAAAAAAAAGLGLGPGLSPASMMRPGQVSLLGPDAVSVLGSGLGLSPGTSSGRNPDPGSGPGTLPDPSSKPLPGSRSTPSPTPVESSDPKAGHDAGPDLVPSPDLDPVPSPDPDPVPSPDPNPVSCPDPCSPTRGTVSPALPTGESPEWVQEQGALLGPDG

SEQ ID NO: 16122 - protein, 420 aa, Homo sapiens
MSRSSPSGKGHSRMAEPRFNNPYFWPPPPTMPSQLDNLVLINKIKEQLMAEKIRPPHLPPTSASSQQPLLVPPAPAESSQAVMSLPKLQQVPGLHPQAVPQPDVALHARPATSTVTGLGLSTRTPSVSTSESSAGAGTGTGTSTPSTPTTTSQSRLIASSPTLISGITSPPLLDSIKTIQGHGLLGPPKSERGRKKIKAENPGGPPVLVVPYPILASGETAKEGKTYRCKVCPLTFFTKSEMQIHSKSHTEAKPHKCPHCSKSFANASYLAQHLRIHLGVKPYHCSYCDKSFRQLSHLQQHTRIHTGDRPYKCPHPGCEKAFTQLSNLQSHQRQHNKDKPYKCPNCYRAYSDSASLQIHLSAHAIKHAKAYCCSMCGRAYTSETYLMKHMSKHTVVEHLVSHHSPQRTESPGIPVRISLI

SEQ ID NO: 16123 - protein, 216 aa, Homo sapiens
MSALGQITITVSRCWNTERNQTDKNPCLHGAYLQLRETVKNKSTHLKKPLMKQAPPWKDHLTFQPLHPAERKTQVWRWQSGNSSDLETTSSASPWPTGSNRDVVLNTLAESCCGLSELITAPPYAGVSIQGFSQIWVLFPFCGGTFHHNEKDVLGLQDFERESVSTSQSRNISLLTLGQLQNCVIGKLTIIDLLTEHLLGVRHGVICFPWGLPSSS

SEQ ID NO: 16124 - protein, 407 aa, Homo sapiens
MQQKAFEESRYPWQESFENVAVCLPLRCPRCGDHTRFRSLSSLRAHLEFSHSYEERTLLTKCSLFPSLKDTDLVTSSELLKPGKLQSSGNVVKQKPSYVNLYSISHEHSKDRKPFEVVAERPVSYVQTYTAMDLHADSLDGTRSGPGLPTSDTKASFEAHVREKFNRMVEAVDRTIEKRIDKLTKELAQKTAELLEVRAAFVQLTQKKQEVQRRERALNRQVDVAVEMIAVLRQRLTESEEELLRKEEEVVTFNHFLEAAAEKEVQGKARLQDFIENLLQRVELAEKQLEYYQSQQASGFVRDLSGHVLTDISSNRKPKCLSRGHPHSVCNHPDLKAHFHPKGRNHLKKAKDDRASMQPAKAIHEQAESSRDLCRPPKKGELLGFGRKGNIRPKMAKKKPTAIVNII

SEQ ID NO: 16125 - protein, 744 aa, Homo sapiens
MQKEMKMIKDEDVHFDLAVKKTPSFPHCLQPVASRGKAPQRHPFPEALRGPFSQFRYEPPPGDLDGFPGVFEGAGSRKRKSMPTKMPYNHPAEEVTLALHSEENKNHGLPNLPLLFPQPPRPKYDSQMIDLCNVGFQFYRSLEHFGGKPVKQEPIKPSAVWPQPTPTPFLPTPYPYYPKVHPGLMFPFFVPSSSPFPFSRHTFLPKQPPEPLLPRKAEPQESEETKQKVERVDVNVQIDDSYYVDVGGSQKRWQCPTCEKSYTSKYNLVTHILGHSGIKPHACTHCGKLFKQLSHLHTHMLTHQGTRPHKCQVCHKAFTQTSHLKRHMMQHSEVKPHNCRVCGRGFAYPSELKAHEAKHASGRENICVECGLDFPTLAQLKRHLTTHRGPIQYNCSECDKTFQYPSQLQNHMMKHKDIRPYICSECGMEFVQPHHLKQHSLTHKGVKEHKCGICGREFTLLANMKRHVLIHTNIRAYQCHLCYKSFVQKQTLKAHMIVHSDVKPFKCKLCGKEFNRMHNLMGHMHLHSDSKPFKCLYCPSKFTLKGNLTRHMKVKHGVMERGLHSQGLGRGRIALAQTAGVLRSLEQEEPFDLSQKRRAKVPVFQSDGESAQGSHCHEEEEEDNCYEVEPYSPGLAPQSQQLCTPEDLSTKSEHAPEVLEEACKEEKEDASKGEWEKRSKGDLGAEGGQERDCAGRDECLSLRAFQSTRRGPSFSDYLYFKHRDESLKELLERKMEKQAVLLGI

SEQ ID NO: 16126 - protein, 350 aa, Homo sapiens
MIRGFEAPMAENPPPPPPPVIFCHDSPKRVLVSVIRTTPIKPTCGGGGEPEPPPPLIPTSPGFSDFMVYPWRWGENAHNVTLSPGAAGAAASAALPAAAAAEHSGLRGRGAPPPAASASAAASGGEDEEEASSPDSGHLKDGIRRGRPRADTVRDLINEGEHSSSRIRCNICNRVFPREKSLQAHKRTHTGERPYLCDYPDCGKAFVQSGQLKTHQRLHTGEKPFVCSENGCLSRFTHANRHCPKHPYARLKREEPTDTLSKHQAADNKAAAEWLARYWEMREQRTPTLKGKLVQKADQEQQDPLEYLQSDEEDDEKRGAQRRLQEQRERLHGALALIELANLTGAPLRQ

SEQ ID NO: 16127 - protein, 561 aa, Homo sapiens
MITSQGSVSFRDVTVGFTQEEWQHLDPAQRTLYRDVMLENYSHLVSVGYCIPKPEVILKLEKGEEPWILEEKFPSQSHLELINTSRNYSIMKFNEFNKGGKCFCDEKHEIIHSEEEPSEYNKNGNSFWLNEDLIWHQKIKNWEQSFEYNECGKAFPENSLFLVHKRGYTGQKTCKYTEHGKTCDMSFFITHQQTHPRENHYGNECGENIFEESILLEHQSVYPFSQKLNLTPIQRTHSINNIIEYNECGTFFSEKLVLHLQQRTHTGEKPYECHECGKTFTQKSAHTRHQRTHTGGKPYECHECGKTFYKNSDLIKHQRIHTGERPYGCHECGKSFSEKSTLTQHQRTHTGEKPYECHECGKTFSFKSVLTVHQKTHTGEKPYECYACGKAFLRKSDLIKHQRIHTGEKPYECNECGKSFSEKSTLTKHLRTHTGEKPYECIQCGKFFCYYSGFTEHLRRHTGEKPFGCNECGKTFRQKSALIVHQRTHIRQKPYGCNQCGKSFCVKSKLIAHHRTHTGEKPYECNVCGKSFYVKSKLTVHQRIHLGRNPINVVNEGNYSG

SEQ ID NO: 16128 - protein, 550 aa, Homo sapiens
MPLQGSVSFKDVTVDFTQEEWQQLDPAQKALYRDVMLENYCHFVSVGFHMAKPDMIRKLEQGEELWTQRIFPSYSYLEEDGKTEDVLVKFKEYQDRHSRPLIFINHKKLIKERSNIYGKTFTLGKNRISKTILCEYKPDGKVLKNISELVIRNISPIKEKFGDSTGWEKSLLNTKHEKIHPAVNLHKQTERVLSGKQELIQHQKVQAPEQPFDHNECEKSFLMKGMLFTHTRAHRGERTFEYNKDGIAFIEKSSLSVHPSNLMEKKPSAYNKYGKFLCRKPVFIMPQRPQTEEKPFHCPYCGNNFRRKSYLIEHQRIHTGEKPYVCNQCGKAFRQKTALTLHEKTHIEGKPFICIDCGKSFRQKATLTRHHKTHTGEKAYECPQCGSAFRKKSYLIDHQRTHTGEKPYQCNECGKAFIQKTTLTVHQRTHTGEKPYICNECGKSFCQKTTLTLHQRIHTGEKPYICNECGKSFRQKAILTVHHRIHTGEKSNGCPQCGKAFSRKSNLIRHQKTHTGEKPYECKQCGKFFSCKSNLIVHQKTHKVETTGIQ

SEQ ID NO: 16129 - protein, 475 aa, Homo sapiens
MAEGSVMFSDVSIDFSQEEWDCLDPVQRDLYRDVMLENYGNLVSMGLYTPKPQVISLLEQGKEPWMVGRELTRGLCSDLESMCETKLLSLKKEVYEIELCQREIMGLTKHGLEYSSFGDVLEYRSHLAKQLGYPNGHFSQEIFTPEYMPTFIQQTFLTLHQIINNEDRPYECKKCGKAFSQNSQFIQHQRIHIGEKSYECKECGKFFSCGSHVTRHLKIHTGEKPFECKECGKAFSCSSYLSQHQRIHTGKKPYECKECGKAFSYCSNLIDHQRIHTGEKPYECKVCGKAFTKSSQLFQHARIHTGEKPYECKECGKAFTQSSKLVQHQRIHTGEKPYECKECGKAFSSGSALTNHQRIHTGEKPYDCKECGKAFTQSSQLRQHQRIHAGEKPFECLECGKAFTQNSQLFQHQRIHTDEKPYECNECGKAFNKCSNLTRHLRIHTGEKPYNCKECGKAFSSGSDLIRHQGIHTNK

SEQ ID NO: 16130 - protein, 577 aa, Homo sapiens
MEESHFNSNPYFWPSIPTVSGQIENTMFINKMKDQLLPEKGCGLAPPHYPTLLTVPASVSLPSGISMDTESKSDQLTPHSQASVTQNITVVPVPSTGLMTAGVSCSQRWRREGSQSRGPGLVITSPSGSLVTTASSAQTFPISAPMIVSALPPGSQALQVVPDLSKKVASTLTEEGGGGGGGGGSVAPKPPRGRKKKRMLESGLPEMNDPYVLSPEDDDDHQKDGKTYRCRMCSLTFYSKSEMQIHSKSHTETKPHKCPHCSKTFANSSYLAQHIRIHSGAKPYSCNFCEKSFRQLSHLQQHTRIHSKMHTETIKPHKCPHCSKTFANTSYLAQHLRIHSGAKPYNCSYCQKAFRQLSHLQQHTRIHTGDRPYKCAHPGCEKAFTQLSNLQSHRRQHNKDKPFKCHNCHRAYTDAASLEVHLSTHTVKHAKVYTCTICSRAYTSETYLMKHMRKHNPPDLQQQVQAAAAAAAVAQAQAQAQAQAQAQAQAQAQAQASQASQQQQQQQQQQQQQQQQPPPHFQSPGAAPQGGGGGDSNPNPPPQCSFDLTPYKTAEHHKDICLTVTTSTIQVEHLASS

SEQ ID NO: 16131 - protein, 386 aa, Homo sapiens
MILGSLSRAGPLPLLRQPPIMQPPLDLKQILPFPLEPAPTLGLFSNYSTMDPVQKAVLSHTFGGPLLKTKRPVISCNICQIRFNSQSQAEAHYKGNRHARRVKGIEAAKTRGREPGVREPGDPAPPGSTPTNGDGVAPRPVSMENGLGPAPGSPEKQPGSPSPPSIPETGQGVTKGEGGTPAPASLPGGSKEEEEKAKRLLYCALCKVAVNSLSQLEAHNKGTKHKTILEARSGLGPIKAYPRLGPPTPGEPEAPAQDRTFHCEICNVKVNSEVQLKQHISSRRHRDGVAGKPNPLLSRHKKSRGAGELAGTLTFSKELPKSLAGGLLPSPLAVAAVMAAAAGSPLSLRPAPAAPLLQGPPITHPLLHPAPGPIRTAHGPILFSPY

SEQ ID NO: 16132 - protein, 471 aa, Homo sapiens
MNMANFLRGFEEKGIKNDRPEDQLSKEKKKILFSFCEVCNIQLNSAAQAQVHSNGKSHRKRVKQLSDGQPPPPAQASPSSNSSTGSTCHTTTLPALVRTPTLMMQPSLDIKPFMSFPVDSSSAVGLFPNFNTMDPVQKAVINHTFGVSIPPKKKQVISCNVCQLRFNSDSQAEAHYKGSKHAKKVKALDATKNKPKMVPSKDSAKANPSCSITPITGNNSDKSEDKGKLKASSSSQPSSSESGSFLLKSGTTPLPPGAATSPSKSTNGAPGTVVESEEEKAKKLLYCSLCKVAVNSLSQLEAHNTGSKHKTMVEARNGAGPIKSYPRPGSRLKMQNGSKGSGLQNKTFHCEICDVHVNSEIQLKQHISSRRHKDRVAGKPLKPKYSPYNKLQRSPSILAAKLAFQKDMMKPLAPAFLSSPLAAAAAVSSALSLPPRPSASLFQAPAIPPALLRPGHGPIRATPASILFAPY

SEQ ID NO: 16133 - protein, 424 aa, Homo sapiens
MGLAAGPASGAPSPLLASLPLPTRPLQPPLDFKHLLAFHFNGAAPLSLFPNFSTMDPVQKAVISHTFGVPSPLKKKLFISCNICHLRFNSANQAEAHYKGHKHARKLKAVEAAKSKQRPHTQAQDGAVVSPIPTLASGAPGEPQSKVPAAPPLGPPLQPPPTPDPTCREPAHSELLDAASSSSSSSCPPCSPEPGREAPGPEPAAAAVGSSMSGEGRSEKGHLYCPTCKVTVNSASQLQAHNTGAKHRWMMEGQRGAPRRSRGRPVSRGGAGHKAKRVTGGRGGRQGPSPAFHCALCQLQVNSETQLKQHMSSRRHKDRLAGKTPKPSSQHSKLQKHAALAVSILKSKLALQKQLTKTLAARFLPSPLPTAATAICALPGPLALRPAPTAATTLFPAPILGPALFRTPAGAVRPATGPIVLAPY

SEQ ID NO: 16134 - protein, 395 aa, Homo sapiens
MRNIMYFGGTCQSPALPALVRPPAPPLQPSLDIKPFLPFPLDTAAAVNLFPNFNAMDPIQKAVINHTFGVPLPHRRKQIISCNICQLRFNSDSQAAAHYKGTKHAKKLKALEAMKNKQKSVTAKDSAKTTFTSITTNTINTSSDKTDGTAGTPAISTTTTVEIRKSSVMTTEITSKVEKSPTTATGNSSCPSTETEEEKAKRLLYCSLCKVAVNSASQLEAHNSGTKHKTMLEARNGSGTIKAFPRAGVKGKGPVNKGNTGLQNKTFHCEICDVHVNSETQLKQHISSRRHKDRAAGKPPKPKYSPYNKLQKTAHPLGVKLVFSKEPSKPLAPRILPNPLAAAAAAAAVAVSSPFSLRTAPAATLFQTSALPPALLRPAPGPIRTAHTPVLFAPY

SEQ ID NO: 16135 - protein, 358 aa, Homo sapiens
MESLRGNTAQGPTNEEDYKNEGQLSRQTKCPAQKKSSFENTVVRKVSVTLKEIFTGEEGPESSEFSLSPNLDAQQKIPKGHGSPISRKNSKDNSDLIKHQRLFSQRKPCKCNECEKAFSYQSDLLVHSRIHGGEKPFECNKCGKSFSRSTHLIEHQRTHTGEKPYECNECGKAFSRSTHLSLHQRIHTGEKPYECSECGKAFSRSTNLSQHQRTHTQERPYKCNECGKAFGDRSTIIQHQRIHTGENPYECSKCGKAFSWISSLTEHQRTHTGENPYECSECGKVFSRSSSLTEHQRIHSGEKPHECRVCGKGFSRSSSLIIHQRTHTGEKPYKCNDCGKAFCQSSTLIRHQHLHTKE

SEQ ID NO: 16136 - protein, 561 aa, Homo sapiens
MNSSLTAQRRGSDAELGPWVMAARSKDAAPSQRDGLLPVKVEEDSPGSWEPNYPAASPDPETSRLHFRQLRYQEVAGPEEALSRLRELCRRWLRPELLSKEQILELLVLEQFLTILPEELQAWVREHCPESGEEAVAVVRALQRALDGTSSQGMVTFEDTAVSLTWEEWERLDPARRDFCRESAQKDSGSTVPPSLESRVENKELIPMQQILEEAEPQGQLQEAFQGKRPLFSKCGSTHEDRVEKQSGDPLPLKLENSPEAEGLNSISDVNKNGSIEGEDSKNNELQNSARCSNLVLCQHIPKAERPTDSEEHGNKCKQSFHMVTWHVLKPHKSDSGDSFHHSSLFETQRQLHEERPYKCGNCGKSFKQRSDLFRHQRIHTGEKPYGCQECGKSFSQSAALTKHQRTHTGEKPYTCLKCGERFRQNSHLNRHQSTHSRDKHFKCEECGETCHISNLFRHQRLHKGERPYKCEECEKSFKQRSDLFKHHRIHTGEKPYGCSVCGKRFNQSATLIKHQRIHTGEKPYKCLECGERFRQSTHLIRHQRIHQNKVLSAGRGGSRL

SEQ ID NO: 16137 - protein, 513 aa, Homo sapiens
MASVLSRRLGKRSLLGARVLGPSASEGPSAAPPSEPLLEGAAPQPFTTSDDTPCQEQPKEVLKAPSTSGLQQVAFQPGQKVYVWYGGQECTGLVEQHSWMEGQVTVWLLEQKLQVCCRVEEVWLAELQGPCPQAPPLEPGAQALAYRPVSRNIDVPKRKSDAVEMDEMMAAMVLTSLSCSPVVQSPPGTEANFSASRAACDPWKESGDISDSGSSTTSGHWSGSSGVSTPSPPHPQASPKYLGDAFGSPQTDHGFETDPDPFLLDEPAPRKRKNSVKVMYKCLWPNCGKVLRSIVGIKRHVKALHLGDTVDSDQFKREEDFYYTEVQLKEESAAAAAAAAAGTPVPGTPTSEPAPTPSMTGLPLSALPPPLHKAQSSGPEHPGPESSLPSGALSKSAPGSFWHIQADHAYQALPSFQIPVSPHIYTSVSWAAAPSAACSLSPVRSRSLSFSEPQQPAPAMKSHLIVTSPPRAQSGARKARGEAKKCRKVYGIEHRDQWCTACRWKKACQRFLD

SEQ ID NO: 16138 - protein, 335 aa, Homo sapiens
MSAKLGKSSSLLTQTSEECNGILTEKMEEEEQTCDPDSSLHWSSSYSPETFRQQFRQFGYQDSPGPHEALSRLWELCHLWLRPEVHTKEQILELLVLEQFLAILPKELQAWVQKHHPENGEETVTMLEDVERELDGPKQIFFGRRKDMIAEKLAPSEITEELPSSQLMPVKKQLQGASWELQSLRPHDEDIKTTNVKSASRQKTSLGIELHCNVSNILHMNGSQSSTYRGTYEQDGRFEKRQGNPSWKKQQKCDECGKIFSQSSALILHQRIHSGKKPYACDECAKAFSRSAILIQHRRTHTGEKPYKCHDCGKAFSQSSNLFRHRKRHIRKKVP

SEQ ID NO: 16139 - protein, 534 aa, Homo sapiens
MAVESGVISTLIPQDPPEQELILVKVEDNFSWDEKFKQNGSTQSCQELFRQQFRKFCYQETPGPREALSRLQELCYQWLMPELHTKEQILELLVLEQFLSILPEELQIWVQQHNPESGEEAVTLLEDLEREFDDPGQQVPASPQGPAVPWKDLTCLRASQESTDIHLQPLKTQLKSWKPCLSPKSDCENSETATKEGISEEKSQGLPQEPSFRGISEHESNLVWKQGSATGEKLRSPSQGGSFSQVIFTNKSLGKRDLYDEAERCLILTTDSIMCQKVPPEERPYRCDVCGHSFKQHSSLTQHQRIHTGEKPYKCNQCGKAFSLRSYLIIHQRIHSGEKAYECSECGKAFNQSSALIRHRKIHTGEKACKCNECGKAFSQSSYLIIHQRIHTGEKPYECNECGKTFSQSSKLIRHQRIHTGERPYECNECGKAFRQSSELITHQRIHSGEKPYECSECGKAFSLSSNLIRHQRIHSGEEPYQCNECGKTFKRSSALVQHQRIHSGDEAYICNECGKAFRHRSVLMRHQRVHTIK

SEQ ID NO: 16140 - protein, 642 aa, Homo sapiens
MAEAAPAPTSEWDSECLTSLQPLPLPTPPAANEAHLQTAAISLWTVVAAVQAIERKVEIHSRRLLHLEGRTGTAEKKLASCEKTVTELGNQLEGKWAVLGTLLQEYGLLQRRLENLENLLRNRNFWILRLPPGIKGDIPKVPVAFDDVSIYFSTPEWEKLEEWQKELYKNIMKGNYESLISMDYAINQPDVLSQIQPEGEHNTEDQAGPEESEIPTDPSEEPGISTSDILSWIKQEEEPQVGAPPESKESDVYKSTYADEELVIKAEGLARSSLCPEVPVPFSSPPAAAKDAFSDVAFKSQQSTSMTPFGRPATDLPEASEGQVTFTQLGSYPLPPPVGEQVFSCHHCGKNLSQDMLLTHQCSHATEHPLPCAQCPKHFTPQADLSSTSQDHASETPPTCPHCARTFTHPSRLTYHLRVHNSTERPFPCPDCPKRFADQARLTSHRRAHASERPFRCAQCGRSFSLKISLLLHQRGHAQERPFSCPQCGIDFNGHSALIRHQMIHTGERPYPCTDCSKSFMRKEHLLNHRRLHTGERPFSCPHCGKSFIRKHHLMKHQRIHTGERPYPCSYCGRSFRYKQTLKDHLRSGHNGGCGGDSDPSGQPPNPPGPLITGLETSGLGVNTEGLETNQWYGEGSGGGVL

SEQ ID NO: 16141 - protein, 552 aa, Homo sapiens
MARVPLTFSDVAIDFSQEEWEYLNSDQRDLYRDVMLENYTNLVSLDFNFTTESNKLSSEKRNYEVNAYHQETWKRNKTFNLMRFIFRTDPQYTIEFGRQQRPKVGCFSQMIFKKHKSLPLHKRNNTREKSYECKEYKKGFRKYLHLTEHLRDHTGVIPYECNECGKAFVVFQHFIRHRKIHTDLKPYECNGCEKAFRFYSQLIQHQIIHTGMKPYECKQCGKAFRRHSHLTEHQKIHVGLKPFECKECGETFRLYRHMCLHQKIHHGVKPYKCKECGKAFGHRSSLYQHKKIHSGEKPYKCEQCEKAFVRSYLLVEHQRSHTGEKPHECMECGKAFGKGSSLLKHKRIHSSEKLYDCKDCGKAFCRGSQLTQHQRIHTGEKPHECKECGKTFKLHSYLIQHQIIHTDLKPYECKQCGKAFSRVGDLKTHQSIHAGEKPYECKECGKTFRLNSQLIYHQTIHTGLKPYVCKECKKAFRSISGLSQHKRIHTGEKPYECKECDKAFNRSDRLTQHETIHTGVKPQKCKECGKAFSHCYQLSQHQRFHHGERLLM

SEQ ID NO: 16142 - protein, 2248 aa, Homo sapiens
MMDSENKPENDEDEKINKEAQDLTKLSSHNEDGGPVSDVIASFPENSMGKRGFSESSNSDSVVIGEDRNKHASKRRKLDEAEPLKSGKQGICRLETSESSVTEGGIALDETGKETFLSDCTVGGTCLPNALSPSCNFSTIDVVSLKTDTEKTSAQEMVSLDLERESPFPPKEISVSCTIGNVDTVLKCSICGHLFSSCSDLEKHAESHMQQPKEHTCCHCSHKAESSSALHMHIKQAHGPQKVFSCDLCGFQCSEENLLNAHYLGKTHLRRQNLAARGGFVQILTKQPFPKKSRTMATKNVHSKPRTSKSIAKNSDSKGLRNVGSTFKDFRGSISKQSGSSSELLVEMMPSRNTLSQEVEIVEEHVTSLGLAQNPENQSRKLDTLVTSEGLLEKLESTKNTLQAAHGNSVTSRPRPERNILVLGNSFRRRSSTFTLKGQAKKRFNLLGIKRGTSETQRMYMKHLRTQMKTHDAESVLKHLEACSSVQRVCVTTSETQEAEQGQGSARPPDSGLHSLTVKPASGSQTLCACTDCGQVATNRTDLEIHVKRCHAREMKFYCRTCDFSSMSRRDLDEHLHSNQHQQTASVLSCQCCSFISLDEINLRDHMKEKHNMHFLCTPCNLFFLSEKDVEEHKATEKHINSLVQPKTLQSSNSDLVLQTLPLSTLESENAKESMDDSGKASQEEPLKSRVSHGNEVRHSSKPQFQCKKCFYKTRSSTVLTRHIKLRHGQDYHFLCKACNLYSLSKEGMEKHIKRSKHLENAKKNNIGLSFEECIERVCIGANDKKEEFDVSGNGRIEGHIGVQLQEHSYLEKGMLASEELSQSGGSTKDDELASTTTPKRGRPKGNISRTCSHCGLLASSITNLTVHIRRKHSHQYSYLCKVCKYYTVTKGDMERHCATKKHKGRVEIEASGKHSSDIIVGPEGGSLEAGKKNAGSAVTMSDEHANKPAESPTSVLEKPDRGNSIEAEVENVFHSLDGEVNSHLLDKKEQISSEPEDFAQPGDVYSQRDVTGTGENKCLHCEFSAHSSASLELHVKRKHTKEFEFYCMACDYYAVTRREMTRHAATEKHKMKRQSYLNSANVEAGSADMSKNIIMPEEEHQQNSEEFQIISGQPSDTLKSRNAADCSILNENTNLDMSKVLCAADSVEVETEEESNFNEDHSFCETFQQAPVKDKVRKPEEMMSLTMSSNYGSPSRFQNENSGSSALNCETAKKNHEISNDAGELRVHCEGEGGNAGDGGGVVPHRHLCPVTLDGERSAESPVLVVTRITREQGNLESGGQNRVARGHGLEDLKGVQEDPVLGNKEILMNSQHETEFILEEDGPASDSTVESSDVYETIISIDDKGQAMYSFGRFDSSIIRIKNPEDGELIDQSEEGLIATGVRISELPLKDCAQGVKKKKSEGSSIGESTRIRCDDCGFLADGLSGLNVHIAMKHPTKEKHFHCLLCGKSFYTESNLHQHLASAGHMRNEQASVEELPEGGATFKCVKCTEPFDSEQNLFLHIKGQHEELLREVNKYIVEDTEQINREREENQGNVCKYCGKMCRSSNSMAFLAHIRTHTGSKPFKCKICHFATAQLGDARNHVKRHLGMREYKCHVCGVAFVMKKHLNTHLLGKHGVGTPKERKFTCHLCDRSFTEKWALNNHMKLHTGEKPFKCTWPTCHYSFLTASAMKDHYRTHTGEKSFLCDLCGFAGGTRHALTKHRRQHTGEKPFKCDECNFASTTQSHLTRHKRVHTGEKPYRCPWCDYRSNCAENIRKHILHTGKHEGVKMYNCPKCDYGTNVPVEFRNHLKEQHPDIENPDLAYLHAGIVSKSYECRLKGQGATFVETDSPFTAAALAEEPLVKEKPLRSSRRPAPPPEQVQQVIIFQGYDGEFALDPSVEETAAATLQTLAMAGQVARVVHITEDGQVIATSQSGAHVGSVVPGPILPEQLADGATQVVVVGGSMEGHGMDESLSPGGAVIQQVTKQEILNLSEAGVAPPEASSALDALLCAVTELGEVEGRAGLEEQGRPGAKDVLIQLPGQEVSHVAADPEAPEIQMFPQAQESPAAVEVLTQVVHPSAAMASQERAQVAFKKMVQGVLQFAVCDTAAAGQLVKDGVTQVVVSEEGAVHMVAGEGAQIIMQEAQGEHMDLVESDGEISQIIVTEELVQAMVQESSGGFSEGTTHYILTELPPGVQDEPGLYSHTVLETADSQELLQAGATLGTEAGAPSRAEQLASVVIYTQEGSSAAAAIQSQRESSELQEA

SEQ ID NO: 16143 - protein, 720 aa, Homo sapiens
MEEAEELLLEGKKALQLAREPRLGLDLGWNPSGEGCTQGLKDVPPEPTRDILALKSLPRGLALGPSLAKEQRLGVWCVGDPLQPGLLWGPLEEESASKEKGEGVKPRQEENLSLGPWGDVCACEQSSGWTSLVQRGRLESEGNVAPVRISERLHLQVYQLVLPGSELLLWPQPSSEGPSLTQPGLDKEAAVAVVTEVESAVQQEVASPGEDAAEPCIDPGSQSPSGIQAENMVSPGLKFPTQDRISKDSQPLGPLLQDGDVDEECPAQAQMPPELQSNSATQQDPDGSGASFSSSARGTQPHGYLAKKLHSPSDQCPPRAKTPEPGAQQSGFPTLSRSPPGPAGSSPKQGRRYRCGECGKAFLQLCHLKKHAFVHTGHKPFLCTECGKSYSSEESFKAHMLGHRGVRPFPCPQCDKAYGTQRDLKEHQVVHSGARPFACDQCGKAFARRPSLRLHRKTHQVPAAPAPCPCPVCGRPLANQGSLRNHMRLHTGEKPFLCPHCGRAFRQRGNLRGHLRLHTGERPYRCPHCADAFPQLPELRRHLISHTGEAHLCPVCGKALRDPHTLRAHERLHSGERPFPCPQCGRAYTLATKLRRHLKSHLEDKPYRCPTCGMGYTLPQSLRRHQLSHRPEAPCSPPSVPSAASEPTVVLLQAEPQLLDTHREEEVSPARDVVEVTISESQEKCFVVPEEPDAAPSLVLIHKDMGLGAWAEVVEVEMGT

SEQ ID NO: 16144 - protein, 821 aa, Homo sapiens
MAANGDSPPWSPALAAEGRGSSCEVRRERTPEARIHSVKRYPDLSPGPKGRSSADHAALNSIVSLQASVSFEDVTVDFSKEEWQHLDPAQRRLYWDVTLENYSHLLSVGYQIPKSEAAFKLEQGEGPWMLEGEAPHQSCSGEAIGKMQQQGIPGGIFFHCERFDQPIGEDSLCSILEELWQDNDQLEQRQENQNNLLSHVKVLIKERGYEHKNIEKIIHVTTKLVPSIKRLHNCDTILKHTLNSHNHNRNSATKNLGKIFGNGNNFPHSPSSTKNENAKTGANSCEHDHYEKHLSHKQAPTHHQKIHPEEKLYVCTECVMGFTQKSHLFEHQRIHAGEKSRECDKSNKVFPQKPQVDVHPSVYTGEKPYLCTQCGKVFTLKSNLITHQKIHTGQKPYKCSECGKAFFQRSDLFRHLRIHTGEKPYECSECGKGFSQNSDLSIHQKTHTGEKHYECNECGKAFTRKSALRMHQRIHTGEKPYVCADCGKAFIQKSHFNTHQRIHTGEKPYECSDCGKSFTKKSQLHVHQRIHTGEKPYICTECGKVFTHRTNLTTHQKTHTGEKPYMCAECGKAFTDQSNLIKHQKTHTGEKPYKCNGCGKAFIWKSRLKIHQKSHIGERHYECKDCGKAFIQKSTLSVHQRIHTGEKPYVCPECGKAFIQKSHFIAHHRIHTGEKPYECSDCGKCFTKKSQLRVHQKIHTGEKPNICAECGKAFTDRSNLITHQKIHTREKPYECGDCGKTFTWKSRLNIHQKSHTGERHYECSKCGKAFIQKATLSMHQIIHTGKKPYACTECQKAFTDRSNLIKHQKMHSGEKRYKASD

SEQ ID NO: 16145 - protein, 478 aa, Homo sapiens
MLSDELESKPELLVQFVQNTSIPLGQGLVESEAKDITCLSLLPVTEASECSRLMLPDDTTNHSNSSKEVPSSAVLRSLRVNVGPDGEETRAQTVQKSPEFLSTSESSSLLQDLQPSDSTSFILLNLTRAGLGSSAEHLVFVQDEAEDSGNDFLSSESTDSSIPWFLRVQELAHDSLIAATRAQLAKNAKTSSNGENVHLGSGDGQSKDSGPLPQVEKKLKCTVEGCDRTFVWPAHFKYHLKTHRNDRSFICPAEGCGKSFYVLQRLKVHMRTHNGEKPFMCHESGCGKQFTTAGNLKNHRRIHTGEKPFLCEAQGCGRSFAEYSSLRKHLVVHSGEKPHQCQVCGKTFSQSGSRNVHMRKHHLQLGAAGSQEQEQTAEPLMGSSLLEEASVPSKNLVSMNSQPSLGGESLNLPNTNSILGVDDEVLAEGSPRSLSSVPDVTHHLVTMQSGRQSYEVSVLTAVNPQELLNQGDLTERRT

SEQ ID NO: 16146 - protein, 312 aa, Homo sapiens
MEEKPSGPIPDMLATAEPSSSETDKEVLSPAVPAAAPSSSMSEEPGPEQAATPPVWERGGAGGMQQGSSPAPDSCQPGPGPSPGLTSIVSGTSEDLRPPRRRPPPGKQIPCSSPGCCLSFPSVRDLAQHLRTHCPPTQSLEGKLFRCSALSCTETFPSMQELVAHSKLHYKPNRYFKCENCLLRFRTHRSLFKHLHVCAEHAQSPAPPPPPALDREPPAPERPPEVDPASAPGLPFPLLEPFTTPAPAPTGPFLPYLNPAPFGLSPPRLRPFLAAAPGPPASSAAVWKKSQGAGSSPRRPQGGSDAPSGACR

SEQ ID NO: 16147 - protein, 603 aa, Homo sapiens
MPELYTEDFIQGCDVGELQEPGLPGVLSYVGAQERALDHRKPSTSSKKTKRVEIDQRCENRLECNGAISAHCNLRLPDSNDSPASASRVAGITDLSRNCVIKELAPQQEGNPGEVFHTVTLEQHEKHDIEEFCFREIKKKIHDFDCQWRDDERNCNKVTTAPKENLTCRRDQRDRRGIGNKSIKHQLGLSFLPHPHELQQFQAEGKIYECNHVEKSVNHGSSVSPPQIISSTIKTHVSNKYGTDFICSSLLTQEQKSCIREKPYRYIECDKALNHGSHMTVRQVSHSGEKGYKCDLCGKVFSQKSNLARHWRVHTGEKPYKCNECDRSFSRNSCLALHRRVHTGEKPYKCYECDKVFSRNSCLALHQKTHIGEKPYTCKECGKAFSVRSTLTNHQVIHSGKKPYKCNECGKVFSQTSSLATHQRIHTGEKPYKCNECGKVFSQTSSLARHWRIHTGEKPYKCNECGKVFSYNSHLASHRRVHTGEKPYKCNECGKAFSVHSNLTTHQVIHTGEKPYKCNQCGKGFSVHSSLTTHQVIHTGEKPYKCNECGKSFSVRPNLTRHQIIHTGKKPYKCSDCGKSFSVRPNLFRHQIIHTKEKPYKRN

SEQ ID NO: 16148 - protein, 594 aa, Homo sapiens
MAAAVLRDSTSVPVTAEAKLMGFTQGCVTFEDVAIYFSQEEWGLLDEAQRLLYRDVMLENFALITALVCWHGMEDEETPEQSVSVEGVPQVRTPEASPSTQKIQSCDMCVPFLTDILHLTDLPGQELYLTGACAVFHQDQKHHSAEKPLESDMDKASFVQCCLFHESGMPFTSSEVGKDFLAPLGILQPQAIANYEKPNKISKCEEAFHVGISHYKWSQCRRESSHKHTFFHPRVCTGKRLYESSKCGKACCCECSLVQLQRVHPGERPYECSECGKSFSQTSHLNDHRRIHTGERPYVCGQCGKSFSQRATLIKHHRVHTGERPYECGECGKSFSQSSNLIEHCRIHTGERPYECDECGKAFGSKSTLVRHQRTHTGEKPYECGECGKLFRQSFSLVVHQRIHTTARPYECGQCGKSFSLKCGLIQHQLIHSGARPFECDECGKSFSQRTTLNKHHKVHTAERPYVCGECGKAFMFKSKLVRHQRTHTGERPFECSECGKFFRQSYTLVEHQKIHTGLRPYDCGQCGKSFIQKSSLIQHQVVHTGERPYECGKCGKSFTQHSGLILHRKSHTVERPRDSSKCGKPYSPRSNIV

SEQ ID NO: 16149 - protein, 575 aa, Homo sapiens
MAAAAPRRPTQQGTVTFEDVAVNFSQEEWCLLSEAQRCLYRDVMLENLALISSLGCWCGSKDEEAPCKQRISVQRESQSRTPRAGVSPKKAHPCEMCGLILEDVFHFADHQETHHKQKLNRSGACGKNLDDTAYLHQHQKQHIGEKFYRKSVREASFVKKRKLRVSQEPFVFREFGKDVLPSSGLCQEAAAVEKTDSETMHGPPFQEGKTNYSCGKRTKAFSTKHSVIPHQKLFTRDGCYVCSDCGKSFSRYVSFSNHQRDHTAKGPYDCGECGKSYSRKSSLIQHQRVHTGKTAYPCEECGKSFSQKGSLISHQRVHTGERPYECREYGKSFGQKGNLIQHQQGHTGERAYHCGECGKSFRQKFCFINHQRVHTGERPYKCGECGKSFGQKGNLVQHQRGHTGERPYECKECGKSFRYRSHLTEHQRLHTGERPYNCRECGKLFNRKYHLLVHERVHTGERPYACEVCGKLFGNKNCVTIHQRIHTGERPYECNECGKSFLSSSALHVHKRVHSGQKPYKCSECGKSFAECSSLIKHRRIHTGERPYECTKCGKTFQRSSTLLHHQSSHRRKAL

SEQ ID NO: 16150 - protein, 676 aa, Homo sapiens
MQGTVAFEDVAVNFSQEEWSLLSEVQRCLYHDVMLENWVLISSLGCWCGSEDEEAPSKKSISIQRVSQVSTPGAGVSPKKAHSCEMCGAILGDILHLADHQGTHHKQKLHRCEAWGNKLYDSSNRPHQNQYLGEKPYRSSVEEALFVKRCKFHVSEESSIFIQSGKDFLPSSGLLLQEATHTGEKSNSKPECESPFQWGDTHYSCGECMKHSSTKHVFVQQQRLPSREECYCWECGKSFSKYDSVSNHQRVHTGKRPYECGECGKSFSHKGSLVQHQRVHTGKRPYECGECGKSFSHKGSLVQHQRVHTGERPYECGECGKSFSQNGTLIKHQRVHTGERPYECEECGKCFTQKGNLIQHQRGHTSERPYECEECGKCFSQKGTLTEHHRVHTRERPYECGECGKSFSRKGHLRNHQRGHTGERPYECGECGKSFSRKGNLIQHQRSHTGERPYECRECRKLFRGKSHLIEHQRVHTGERPYECNECGKSFQDSSGFRVHQRVHTGEKPFECSECGKSFPQSCSLLRHRRVHTGERPYECGECGKSFHQSSSLLRHQKTHTAERPYECRECGKFFSSLLEHRRVHTGERPYECRECGKTFTRRSAHFKHQRLHTRGKPYECSECGKSFAETFSLTEHRRVHTGERPYECSECGKSFHRSSSLLRHQRVHTERSPYK

SEQ ID NO: 16151 - protein, 510 aa, Homo sapiens; identical to SEQ ID NO: 14429

SEQ ID NO: 16152 - protein, 688 aa, Homo sapiens
MARKLVMFRDVAIDFSQEEWECLDSAQRDLYRDVMLENYSNLVSLDLPSRCASKDLSPEKNTYETELSQWEMSDRLENCDLEESNSRDYLEAKGKMEKQQENQKEYFRQGMIIYDKMSIFNQHTYLSQHSRCHSTEKPYKCKECGKAFRRASHLTQHQSIHTGEKPYECKQCGKAFSRDSQLSLHQRLHTGEKPYACKECGKAFTQSSQLILHHRIHTGEKPYKCEECGKAFIRSSQLTRHQKVHTGEKPYECKECGKAFTQNSQLTLHQRLHTGEKLYECKECRKVFTQLSQLILHKRIHTGEKPYECKECGKAFICGSQLSQHQKIHNGEKPYECKECGRAFIRGSLLMQHQRIHTGEKPYKCEECGKAFIRGSQLTQHQRIHTNEKPYECKECGKMFSHGSQLTQHQRIHTGEKPYQCKECGKAFNRGSLLTRHQRIHTGEKPYECKECGKTFSRGSELTQHERIHTGEKPYECKECGKSFIRGSQLTQHQRIHTGEKPYECKECRMAFTQSSHLSQHQRLHTGEKPYVCNECGKAFARGLLLIQHQRIHTGEKPYQCKECGKAFIRGSQLTQHQRIHTGEKPYECKECGKAFSHGSQLTLHQRIHTGEKPYECRECRKAFTQSSHLSRHQRIHTGEKPYQCKECGKAFTRGSQLTQHQRIHISEKSFEYKECGIDFSHGSQVYM

SEQ ID NO: 16153 - protein, 1284 aa, Homo sapiens
MHKKRVEEGEASDFSLAWDSSVTAAGGLEGEPECDQKTSRALEDRNSVTSQEERNEDDEDMEDESIYTCDHCQQDFESLADLTDHRAHRCPGDGDDDPQLSWVASSPSSKDVASPTQMIGDGCDLGLGEEEGGTGLPYPCQFCDKSFIRLSYLKRHEQIHSDKLPFKCTYCSRLFKHKRSRDRHIKLHTGDKKYHCHECEAAFSRSDHLKIHLKTHSSSKPFKCTVCKRGFSSTSSLQSHMQAHKKNKEHLAKSEKEAKKDDFMCDYCEDTFSQTEELEKHVLTRHPQLSEKADLQCIHCPEVFVDENTLLAHIHQAHANQKHKCPMCPEQFSSVEGVYCHLDSHRQPDSSNHSVSPDPVLGSVASMSSATPDSSASVERGSTPDSTLKPLRGQKKMRDDGQGWTKVVYSCPYCSKRDFNSLAVLEIHLKTIHADKPQQSHTCQICLDSMPTLYNLNEHVRKLHKNHAYPVMQFGNISAFHCNYCPEMFADINSLQEHIRVSHCGPNANPSDGNNAFFCNQCSMGFLTESSLTEHIQQAHCSVGSAKLESPVVQPTQSFMEVYSCPYCTNSPIFGSILKLTKHIKENHKNIPLAHSKKSKAEQSPVSSDVEVSSPKRQRLSASANSISNGEYPCNQCDLKFSNFESFQTHLKLHLELLLRKQACPQCKEDFDSQESLLQHLTVHYMTTSTHYVCESCDKQFSSVDDLQKHLLDMHTFVLYHCTLCQEVFDSKVSIQVHLAVKHSNEKKMYRCTACNWDFRKEADLQVHVKHSHLGNPAKAHKCIFCGETFSTEVELQCHITTHSKKYNCKFCSKAFHAIILLEKHLREKHCVFDAATENGTANGVPPMATKKAEPADLQGMLLKNPEAPNSHEASEDDVDASEPMYGCDICGAAYTMEVLLQNHRLRDHNIRPGEDDGSRKKAEFIKGSHKCNVCSRTFFSENGLREHLQTHRGPAKHYMCPICGERFPSLLTLTEHKVTHSKSLDTGTCRICKMPLQSEEEFIEHCQMHPDLRNSLTGFRCVVCMQTVTSTLELKIHGTFHMQKLAGSSAASSPNGQGLQKLYKCALCLKEFRSKQDLVKLDVNGLPYGLCAGCMARSANGQVGGLAPPEPADRPCAGLRCPECSVKFESAEDLESHMQVDHRDLTPETSGPRKGTQTSPVPRKKTYQCIKCQMTFENEREIQIHVANHMIEEGINHECKLCNQMFDSPAKLLCHLIEHSFEGMGGTFKCPVCFTVFVQANKLQQHIFAVHGQEDKIYDCSQCPQKFFFQTELQNHTMSQHAQ

SEQ ID NO: 16154 - protein, 752 aa, Homo sapiens
MAEPASVTVTFDDVALYFSEQEWEILEKWQKQMYKQEMKTNYETLDSLGYAFSKPDLITWMEQGRMLLISEQGCLDKTRRTTSPPTDEQLNMKNTGKLLCFDDEGTPRTKEEDCRLNGPQKQDLCAALRGKERKILLAQTATFQSPSLRETEILNKKVSITAYDPDKKDLRHKPRETPGRLEIPTGPRCYSCYVCRKVFQVRRDLLKHKRSHSKSQLCRYPKYKNSSRGKSELRRTQRLLCQKKRFQCSECEKSYFLKGSLVTHQVVHTGQRPYPCPECDKTFRYRANLKKHLCLHRGERPFCCGECGRAFVQQCELTEHLRLHSGEKPFQCPQCDRCFRLKRGMKVHLTQHSGKRPFHCPECGRSFSRKAALKTHQRTHSEEKPFSCGECGRKFIYKIKLDEHIRVHTGEKPFSCPECNKSFRLKRSLKAHGLQHIGKRPFQCPECSRGFFWRNAMRAHQRLHSEQKPFPCAECGKRFTRPSKLACHTRVHDRQKEFPCGECKKTFSQQSRLTQHLKVHTTEKPFSCAECGRSFRRRAHLTEHTRLHSGEEPFQCPECDKSFSWKASMKFHQRMHRDEKPFACGECDKTYTHQSQLTEHLRLHSGEKPYQCPECEKTFRLKGNLKSHLLQHSGQKPFSCVMCGKSFTQQYRLTEHIRVHSGEKPFQCPECDKSYCIRGSLKVHLYKHSGERPFQCPECGKGFLQKRSLKAHLCLHSGERPFSCDECGRSFTYVGALKTHIAVHAKEKPSSL

SEQ ID NO: 16155 - protein, 554 aa, Homo sapiens
MAAADLSHGHYLSGDPVCLHEEKTPAGRIVADCLTDCYQDSVTFDDVAVDFTQEEWTLLDSTQRSLYSDVMLENYKNLATVGGQIIKPSLISWLEQEESRTVQGGVLQGWEMRLETQWSILQQDFLRGQTSIGIQLEGKHNGRELCDCEQCGEVFSEHSCLKTHVRTQSTGNTHDCNQYGKDFLTLCEKTSTGEKLSEFNQSEKIFSLTPNIVYQRTSTQEKSFECSHCGKSFINESYLQAHMRTHNGEKLYEWRNYGPGFIDSTSLSVLIETLNAKKPYKCKECGKGYRYPAYLSIHMRTHTGEKPYECKECGKAFNYSNSFQIHGRTHTGEKPYVCKECGKAFTQYSGLSMHVRSHSGDKPYECKECGKSFLTSSRLIQHIRTHTGEKPFVCVECGKAFAVSSNLSGHLRTHTEEKACECKICGKVFGYPSCLNNHMRTHSAQKPYTCKECGKAFNYSTHLKIHMRIHTGEKPYECKQCGKAFSHSSSFQIHERTHTGEKPYECKECGKAFTCSSSFRIHEKTHTEEKPYKCQQCGKAYSHPRSLRRHEQIH

SEQ ID NO: 16156 - protein, 188 aa, Homo sapiens
MTETREPAETGGYASLEEDDEDLSPGPEHSSDSEYTLSEPDSEEEEDEEEEEEETTDDPEYDPGYKVKQRLGGGRGGPSRRAPRAAQPPAQPCQLCGRSPLGEAPPGTPPCRLCCPATAPQEAPAPEGRALGEEEEEPPRAGEGRPAGREEEEEEEEEGTYHCTECEDSFDNLGELHGHFMLHARGEV

SEQ ID NO: 16157 - protein, 674 aa, Homo sapiens
MGPLTFTDVAIEFSLEEWQCLDTAQQNLYRNVMLENYRNLVFLGIAVSKPDLITCLEKEKEPCKMKRHEMVDEPPVVCSHFAEDFWPEQDIKDSFQKVTLRRYDKRGHENLQLRKGYKTVGDCKLYKGGYNGLNQCLTLTQSKMYHCDIYVKVFYAFSNADRYKTRHTGKKPFQCKKCGKSFCMLSQLTQHKKIHIRENTYRCKEFGNAFNQSSALTNHKRIYVGEKHYRCEECGKAFNHYSTLTNHKRIHTGEKPYKCKECGKAFSRYSTLTTHKRIHSGEKPYKCDECGKTFSISSTFTKHKIIHTEEKPYKCKECGKAFNRSSTLTSHKRIHTGEKPYKCEECGKAFNWSSTLTKHKVIHTGEKPYKCEECGKAFNQSSRLTRHKKIHTGEEPYKFEKCGRVFTCSSTLTQDKKIHTGEKPYNCEECGKVFTYSSTLTRHKRIHTEEKPYKCNECGKAFNRSSHLTSHRRIHTGEKPYKCEECGKAFKQSSNLNSHKKIHSGEKPYKCEECGKAFILSSRLTQHKKIHTGEKPYKCEECGKAFNRSSRLTQHKKIHTGEKPYKCKQCDKAFTHSSNLSSHKKIHSGEKPYKCEECGKAFNRSSRLTQHKKIHTREKPYKCEECAKAFTRSSRLTQHKKIHRMGVVAHACNPSTLGGRGGRITRSGDRDRPG

SEQ ID NO: 16158 - protein, 809 aa, Homo sapiens
MGPLTFMDVAIEFCLEEWQCLDIAQQNLYRNVMLENYRNLVFLGIAVSKPDLITCLEQEKEPWEPMRRHEMVAKPPVMCSHFTQDFWPEQHIKDPFQKATLRRYKNCEHKNVHLKKDHKSVDECKVHRGGYNGFNQCLPATQSKIFLFDKCVKAFHKFSNSNRHKISHTEKKLFKCKECGKSFCMLPHLAQHKIIHTRVNFCKCEKCGKAFNCPSIITKHKRINTGEKPYTCEECGKVFNWSSRLTTHKKNYTRYKLYKCEECGKAFNKSSILTTHKIIRTGEKFYKCKECAKAFNQSSNLTEHKKIHPGEKPYKCEECGKAFNWPSTLTKHKRIHTGEKPYTCEECGKAFNQFSNLTTHKRIHTAEKFYKCTECGEAFSRSSNLTKHKKIHTEKKPYKCEECGKAFKWSSKLTEHKLTHTGEKPYKCEECGKAFNWPSTLTKHNRIHTGEKPYKCEVCGKAFNQFSNLTTHKRIHTAEKPYKCEECGKAFSRSSNLTKHKKIHIEKKPYKCEECGKAFKWSSKLTEHKITHTGEKPYKCEECGKAFNHFSILTKHKRIHTGEKPYKCEECGKAFTQSSNLTTHKKIHTGEKFYKCEECGKAFTQSSNLTTHKKIHTGGKPYKCEECGKAFNQFSTLTKHKIIHTEEKPYKCEECGKAFKWSSTLTKHKIIHTGEKPYKCEECGKAFKLSSTLSTHKIIHTGEKPYKCEKCGKAFNRSSNLIEHKKIHTGEQPYKCEECGKAFNYSSHLNTHKRIHTKEQPYKCKECGKAFNQYSNLTTHNKIHTGEKLYKPEDVTVILTTPQTFSNIK

SEQ ID NO: 16159 - protein, 570 aa, Homo sapiens
MENLKSGVYPLKEASGCPGADRNLLVYSFYEKGPLTFRDVAIEFSLEEWQCLDTAQQDLYRKVMLENYRNLVFLAGIAVSKPDLITCLEQGKEPWNMKRHAMVDQPPVTYSHFAQDLWPEQGIKDSFQEVILRRYGKCGHEDLQLRTGCKSVDECNLHKECYDELNQCLTTTQSEIFQYDKYVNVFYKFSNPNIQKIRHTGKKPFKCKKCDKSFCMLLHLTQHKRIHIRENSYQCEECGKVFNWFSTLTRHRRIHTGEKPYKCEQCGKAFKQSSTLTTHKIIHTGEKPYRCEECGKTFNRSSHLTTHKRIHTGEKPYRCEECGRAFNRSSHLTTHKIIHTGEKPYKCEECGKAFNQSSTLTTHKIIHAGEKPYKCEECGKAFYRFSYLTKHKIIHTGEKFYKCEECGKGFNWSSTLTKHKRIHTGEKPYKCEQCGKAFNESSNLTAHKIIHTGEKPYKCEECGKAFNRSPKLTAHKVIHSGEKPYKCEECGKAFNQFSNLTKHKITHIGDTSYKYLECDKAFSQSSTLTKHKVIHTGEKPYNCEEYGKAFNQSSNLIEQSNSYWRETLQM

SEQ ID NO: 16160 - protein, 576 aa, Homo sapiens
MDDLKYGVYPLKEASGCPGAERNLLVYSYFEKETLTFRDVAIEFSLEEWECLNPAQQNLYMNVMLENYKNLVFLGVAVSKQDPVTCLEQEKEPWNMKRHEMVDEPPAMCSYFTKDLWPEQDIKDSFQQVILRRYGKCEHENLQLRKGSASVDEYKVHKEGYNELNQCLTTTQSKIFPCDKYVKVFHKFLNANRHKTRHTGKKPFKCKKCGKSFCMLLHLSQHKRIHIRENSYQCEECGKAFKWFSTLTRHKRIHTGEKPFKCEECGKAFKQSSTLTTHKIIHTGEKPYRCEECGKAFNRSSHLTTHKIIHTGEKPYKCEECGKAFNQSSTLSTHKFIHAGEKPYKCEECDKAFNRFSYLTKHKIIHTGEKSYKCEECGKGFNWSSTLTKHKRIHTGEKPYKCEVCGKAFNESSNLTTHKMIHTGEKPYKCEECGKAFNRSPQLTAHKIIHTGEKPYKCEECGKAFSQSSILTTHKRIHTGEKPYKCEECGKAFNRSSNLTKHKIIHTGEKSYKCEECGKAFNQSSTLTKHRKIHTRQKPYNCEECDNTFNQSSNLIKQNNSYWRETLQMSRMWESL

SEQ ID NO: 16161 - protein, 652 aa, Homo sapiens
MINAQELLTLEDVTVEFTWEEWQLLGPFQKDLYRDVMLEIYSNLLSMGYQVSKPDALSKLERGEEPWTMEDERHSRICPENNEVDDHLQDHLENQRMLKSVEQYHEHNAFGNTASQTKSLCLFRENHDTFELYIKTLKSNLSLVNQNKSCEINNSTKFSGDGKSFLHGNYEELYSAAKFSVSTKANSTKSQVSKHQRTHEIEKNHVCSECGKAFVKKSQLTDHERVHTGEKPYGCTLCAKVFSRKSRLNEHQRIHKREKSFICSECGKVFTMKSRLIEHQRTHTGEKPYICNECGKGFPGKRNLIVHQRNHTGEKSYICSECGKGFTGKSMLIIHQRTHTGEKPYICSECGKGFTTKHYVIIHQRNHTGEKPYICNECGKGFTMKSRMIEHQRTHTGEKPYICSECGKGFPRKSNLIVHQRNHTVEKSYLCSECGKGFTVKSMLIIHQRTHTGEKPYTCSECGKGFPLKSRLIVHQRTHTGEKPYRCSECGKGFIVNSGLMLHQRTHTGEKPYICNECGKGFAFKSNLVVHQRTHTGEKPFMCSECGKGFTMKRYLIVHQQIHTEEKSCICSECGRGFAKETELALHKQVHTGEKPYGCNECGKGFTMKSRLIVHQRTHTGEKPFVCSECRKAFSSKRNLIVHQRTHNGNKP

SEQ ID NO: 16162 - protein, 673 aa, Homo sapiens; identical to SEQ ID NO: 14441

SEQ ID NO: 16163 - protein, 470 aa, Homo sapiens
MAATLLMAGSQAPVTFEDMAMYLTREEWRPLDAAQRDLYRDVMQENYGNVVSLDFEIRSENEVNPKQEISEDVQFGTTSERPAENAEENPESEEGFESGDRSERQWGDLTAEEWVSYPLQPVTDLLVHKEVHTGIRYHICSHCGKAFSQISDLNRHQKTHTGDRPYKCYECGKGFSRSSHLIQHQRTHTGERPYDCNECGKSFGRSSHLIQHQTIHTGEKPHKCNECGKSFCRLSHLIQHQRTHSGEKPYECEECGKSFSRSSHLAQHQRTHTGEKPYECNECGRGFSERSDLIKHYRVHTGERPYKCDECGKNFSQNSDLVRHRRAHTGEKPYHCNECGENFSRISHLVQHQRTHTGEKPYECNACGKSFSRSSHLITHQKIHTGEKPYECNECWRSFGERSDLIKHQRTHTGEKPYECVQCGKGFTQSSNLITHQRVHTGEKPYECTECEKSFSRSSALIKHKRVHTD

SEQ ID NO: 16164 - protein, 828 aa, Homo sapiens
MQNSVSVPPKDEGESNIPSGTIQSRKGLQNKSQFRTIAPKIVPKVLTSRMLPCHSPSRSDQVNLGPSINSKLLGMSTQNYALMQVAGQEGTFSLVALPHVASAQPIQKPRMSLPENLKLPIPRYQPPRNSKASRKKPILIFPKSGCSKAPAQTQMCPQMSPSPPHHPELLYKPSPFEEVPSLEQAPASISTAALTNGSDHGDLRPPVTNTHGSLNPPATPASSTPEEPAKQDLTALSGKAHFVSKITSSKPSAVASEKFKEQVDLAKTMTNLSPTILGNAVQLISSVPKGKLPIPPYSRMKTMEVYKIKSDANIAGFSLPGPKADCDKIPSTTEGFNAATKVASRLPVPQVSQQSACESAFCPPTKLDLNHKTKLNSGAAKRKGRKRKVPDEILAFQGKRRKYIINKCRDGKERVKNDPQEFRDQKLGTLKKYRSIMPKPIMVIPTLASLASPTTLQSQMLGGLGQDVLLNNSLTPKYLGCKQDNSSSPKPSSVFRNGFSGIKKPWHRCHVCNHHFQFKQHLRDHMNTHTNRRPYSCRICRKSYVRPGSLSTHMKLHHGENRLKKLMCCEFCAKVFGHIRVYFGHLKEVHRVVISTEPAPSELQPGDIPKNRDMSVRGMEGSLERENKSNLEEDFLLNQADEVKLQIKCGRCQITAQSFAEIKFHLLDVHGEEIEGRLQEGTFPGSKGTQEELVQHASPDWKRHPERGKPEKVHSSSEESHACPRLKRQLHLHQNGVEMLMENEGPQSGTNKPRETCQGPECPGLHTFLLWSHSGFNCLLCAEMLGRKEDLLHHWKHQHNCEDPSKLWAILNTVSNQGVIELSSEAEK

SEQ ID NO: 16165 - protein, 499 aa, Homo sapiens
MLSLSPILLYTCEMFQDPVAFKDVAVNFTQEEWALLDISQKNLYREVMLETFWNLTSIGKKWKDQNIEYEYQNPRRNFRSVTEEKVNEIKEDSHCGETFTPVPDDRLNFQKKKASPEVKSCDSFVCEVGLGNSSSNMNIRGDTGHKACECQEYGPKPWKSQQPKKAFRYHPSLRTQERDHTGKKPYACKECGKNIIYHSSIQRHMVVHSGDGPYKCKFCGKAFHCLSLYLIHERTHTGEKPYECKQCGKSFSYSATHRIHERTHIGEKPYECQECGKAFHSPRSCHRHERSHMGEKAYQCKECGKAFMCPRYVRRHERTHSRKKLYECKQCGKALSSLTSFQTHIRMHSGERPYECKTCGKGFYSAKSFQRHEKTHSGEKPYKCKQCGKAFTRSGSFRYHERTHTGEKPYECKQCGKAFRSAPNLQLHGRTHTGEKPYQCKECGKAFRSASQLRIHRRIHTGEKPYECKKCGKAFRYVQNFRFHERTQTHKNALWRKTL

SEQ ID NO: 16166 - protein, 663 aa, Homo sapiens
MALCYGTFWGYPKMLEAANLMEGLVDIGPWVTLPRGQPEVLEWGLPKDQDSVAFEDVAVNFTHEEWALLGPSQKNLYRDVMRETIRNLNCIGMKWENQNIDDQHQNLRRNPRCDVVERFGKSKDGSQCGETLSQIRNSIVNKNTPARVDACGSSVNGEVIMGHSSLNCYIRVDTGHKHRECHEYAEKSYTHKQCGKGLSYRHSFQTCERPHTGKKPYDCKECGKTFSSPGNLRRHMVVKGGDGPYKCELCGKAFFWPSLLRMHERTHTGEKPYECKQCSKAFPVYSSYLRHEKIHTGEKPYECKQCSKAFPDYSSYLRHERTHTGEKPYKCKQCGKAFSVSGSLRVHERIHTGEKPYTCKQCGKAFCHLGSFQRHMIMHSGDGPHKCKICGKGFDFPGSARIHEGTHTLEKPYECKQCGKLLSHRSSFRRHMMAHTGDGPHKCTVCGKAFDSPSVFQRHERTHTGEKPYECKQCGKAFRTSSSLRKHETTHTGEQPYKCKCGKAFSDLFSFQSHETTHSEEEPYECKECGKAFSSFKYFCRHERTHSEEKSYECQICGKAFSRFSYLKTHERTHTAEKPYECKQCRKAFFWPSFLLRHERTHTGERPYECKHCGKAFSRSSFCREHERTHTGEKPYECKECGKAFSSLSSFNRHKRTHWKDIL

SEQ ID NO: 16167 - protein, 595 aa, Homo sapiens
MDPVAFKDVAVNFTQEEWALLDISQRKLYREVMLETFRNLTSLGKRWKDQNIEYEHQNPRRNFRSLIEEKVNEIKDDSHCGETFTPVPDDRLNFQEKKASPEVKSCESFVCGEVGLGNSSFNMNIRGDIGHKAYEYQEYGPKPCKCQQPKKAFRYRPSFRTQERDHTGEKPNACKVCGKTFISHSSVRRHMVMHSGDGPYKCKFCGKAFHCLRLYLIHERIHTGEKPCECKQCGKSFSYSATHRIHKRTHTGEKPYEYQECGKAFHSPRSYRRHERIHMGEKAYQCKECGKAFTCPRYVRIHERTHSRKNLYECKQCGKALSSLTSFQTHVRLHSGERPYECKICGKDFCSVNSFQRHEKIHSGEKPYKCKQCGKAFPHSSSLRYHERTHTGEKPYECKQCGKAFRSASHLRVHGRTHTGEKPYECKECGKAFRYVNNLQSHERTQTHIRIHSGERRYKCKICGKGFYCPKSFQRHEKTHTGEKLYECKQRSVVPSVVPVPFDIMKGLTLERSPINASNVGKPSELCQSFECMVGLTLKRNPMSVSNDGKPSDLPHTFEYVVGHTMERSPMHVRNVGNPSDLPRTFEFMKGHKHT

SEQ ID NO: 16168 - protein, 693 aa, Homo sapiens
MDSVAFEDVAINFTCEEWALLGPSQKSLYRDVMQETIRNLDCIGMIWQNHDIEEDQYKDLRRNLRCHMVERACEIKDNSQCGGPFTQTQDSIVNEKIPGVDPWESSECTDVLMGRSSLNCYVRVDSEHKPCEYQEYGEKPYTHTQCGTAFSYQPCFQIHERPQHGKKLYDCKECASFSSLENLQRHMAAHHGDGPRICKLCGNAFIWPSLFHMLRRTHTEEKPYEYEQCSTAFPAYSSTLRHERTHSGEKPYQCKQCGKAFSCSCYTQLYERTHTGEQSYECKQCGKAFYHLGSFQRHMIVHTGDGPHKCKICGKGFLSPSSVRRHKRTHTGEKPYECKYCGKAFSDCTGFRRHMITHTGDGPHKCKVCGKAFDSPSLCRRHETTHTGEKPYKCECGKAFSDFYYFRNHETTHTGEKPYKCKQCGKAFICCTYLQIHERIHTGERPYKCKQCGKAFRSSNYIRVHEKTHTGEKPYECKQCGKALSHLKSFQRHMIMHTGDGPHKCKICGKSFDSPSSFRRHERIHTGERPYKCKLCGKGFRSSSYIQLHERTHTGEKPYGCQQCGKALSDLSSFRRHMITHTGNGPHKCKICGKGFDYPSSVQRHERTHTGEKPYECKECGKAFSHSSYLRIHERVHTGEKPYKCKECGKPFHCPSAFHKHERTHSMEKPYKCKECGEAFHCISSFHKHEMTH

SEQ ID NO: 16169 - protein, 627 aa, Homo sapiens
MIVFGGEDRSDLFLPDSQTNEERKQYDSVAFEDVAVNFTQEEWALLGPSQKSLYRDVMWETIRNLDCIGMKWEDTNIEDQHRNPRRSLRCHIIERFSESRQPDSTVNEKPPGVDPCKSSVCGEIMGCSFLNCYITFDAGHKPDECQEYGEKPHTHKQCGTAFNYHHSFQTQERPHTGKKRYDCKECGKTFSSSGNLRRHIIVQRGGGPYICKLCGKAFFWPSLFRMHERTHTGEKPYECKQCCKAFPIYSSYLRHERTHTGEKPYECKHCSKAFPDYSSYVRHERTHTGEKPYKCKRCGRAFSVSSSLRIHERTHTGEKPYECKQCGKAFHHLGSFQRHMIRHTGDGPHKCKICGKGFDCPSSLQSHERTHTGEKPYECKQCGKALSHHSSFRSHMIMHTGDGPHKCKVCGKAFIYPSVFQGHERTHTGEKPYECKECGKAFRISSSLRRHETTHTGEKPYKCKCGKAFIDFYSFQNHETTHTGEKPYECKECGKAFSCFTYLSQHRRTHMAEKPYECKTCKKAFSHFGNLKVHERIHTGEKPYECKECRKAFSWLTCLLRHERIHTGKKSYECQQCGKAFTRSRFLRGHEKTHTGEKMHECKECGKALSSLSSLHRHKRTHWRDTL

SEQ ID NO: 16170 - protein, 671 aa, Homo sapiens
MASVALEDVAVNFTREEWALLGPCQKNLYKDVMQETIRNLDCVVMKWKDQNIEDQYRYPRKNLRCRMLERFVESKDGTQCGETSSQIQDSIVTKNTLPGVGPCESSMRGEKVMGHSSLNCYIRVGAGHKPHEYHECGEKPDTHKQRGKAFSYHNSFQTHERLHTGKKPYDCKECGKSFSSLGNLQRHMAVQRGDGPYKCKLCGKAFFWPSLLHMHERTHTGEKPYECKQCSKAFSFYSSYLRHERTHTGEKPYECKQCSKAFPFYSSYLRHERTHTGEKPYKCKQCSKAFPDSSSCLIHERTHTGEKPYTCKQCGKAFSVSGSLQRHETTHSAEKPYACQQCGKAFHHLGSFQRHMIRHTGNGPHKCKICGKGFDCPSSLQSHERTHTGEKPYECKQCGKALSHRSSFRSHMIMHTGDGPHKCKVCGKAFVYPSVFQRHERTHTAEKPYKCKQCGKAYRISSSLRRHETTHTGEKPYKCKLGKACIDFCSFQNHKTTHTGEKPYECKECGKAFSRFRYLSRHKRTHTGEKPYECKTCRKAFGHYDNLKVHERIHSGEKPYECKECGKAFSWLTCFLRHERIHMREKSYECPQCGKAFTHSRFLQGHEKTHTGENPYECKECGKAFASLSSLHRHKKTHWKKTHTGENPYECKECGKAFASLSSLHRHKKTH

SEQ ID NO: 16171 - protein, 327 aa, Homo sapiens
MEVAVPVKQEAEGLALDSPWHRFRRFHLGDAPGPREALGLLRALCRDWLRPEVHTKEQMLELLVLEQFLSALPADTQAWVCSRQPQSGEEAVALLEELWGPAASPDGSSATRVPQDVTQGPGATGGKEDSGMIPLAGTAPGAEGPAPGDSQAVRPYKQEPSSPPLAPGLPAFLAAPGTTSCPECGKTSLKPAHLLRHRQSHSGEKPHACPECGKAFRRKEHLRRHRDTHPGSPGSPGPALRPLPAREKPHACCECGKTFYWREHLVRHRKTHSGARPFACWECGKGFGRREHVLRHQRIHGRAAASAQGAVAPGPDGGGPFPPWPLG

SEQ ID NO: 16172 - protein, 1031 aa, Homo sapiens
MPPGRWHAAYPAQAQSSRERGRLQTVKKEEEDESYTPVQAARPQTLNRPGQELFRQLFRQLRYHESSGPLETLSRLRELCRWWLRPDVLSKAQILELLVLEQFLSILPGELRVWVQLHNPESGEEAVALLEELQRDLDGTSWRDPGPAQSPDVHWMGTGALRSAQIWSLASPLRSSSALGDHLEPPYEIEARDFLAGQSDTPAAQMPALFPREGCPGDQVTPTRSLTAQLQETMTFKDVEVTFSQDEWGWLDSAQRNLYRDVMLENYRNMASLVGPFTKPALISWLEAREPWGLNMQAAQPKGNPVAAPTGDDLQSKTNKFILNQEPLEEAETLAVSSGCPATSVSEGIGLRESFQQKSRQKDQCENPIQVRVKKEETNFSHRTGKDSEVSGSNSLDLKHVTYLRVSGRKESLKHGCGKHFRMSSHHYDYKKYGKGLRHMIGGFSLHQRIHSGLKGNKKDVCGKDFSLSSHHQRGQSLHTVGVSFKCSDCGRTFSHSSHLAYHQRLHTQEKAFKCRVCGKAFRWSSNCARHEKIHTGVKPYKCDLCEKAFRRLSAYRLHRETHAKKKFLELNQYRAALTYSSGFDHHLGDQSGEKLFDCSQCRKSFHCKSYVLEHQRIHTQEKPYKCTKCRKTFRWRSNFTRHMRLHEEEKFYKQDECREGFRQSPDCSQPQGAPAVEKTFLCQQCGKTFTRKKTLVDHQRIHTGEKPYQCSDCGKDFAYRSAFIVHKKKHAMKRKPEGGPSFSQDTVFQVPQSSHSKEEPYKCSQCGKAFRNHSFLLIHQRVHTGEKPYKCRECGKAFRWSSNLYRHQRIHSLQKQYDCHESEKTPNVEPKILTGEKRFWCQECGKTFTRKRTLLDHKGIHSGEKRYKCNLCGKSYDRNYRLVNHQRIHSTERPFKCQWCGKEFIGRHTLSSHQRKHTRAAQAERSPPARSSSQDTKLRLQKLKPSEEMPLEDCKEACSQSSRLTGLQDISIGKKCHKCSICGKTFNKSSQLISHKRFHTRERPFKCSKCGKTFRWSSNLARHMKNHIRD

SEQ ID NO: 16173 - protein, 450 aa, Homo sapiens
MPSPLGPPCLPVMDPETTLEEPETARLRFRGFCYQEVAGPREALARLRELCCQWLQPEAHSKEQMLEMLVLEQFLGTLPPEIQAWVRGQRPGSPEEAAALVEGLQHDPGQLLGWITAHVLKQEVLPAAQKTEEPLGSPHPSGTVESPGEGPQDTRIEGSVQLSCSVKEEPNVDGQEVAPSSPPLAAQSPEGNHGHQEPASTSFHPPRIQEEWGLLDRSQKELYWDAMLEKYGTVVSLGLPPHQPEAQAQSELGMLLTGTGVCRSLRSGNESEGPPGCPEAQPPQGPGPAAWEGLSGAATPAPTVRPGTPPVPTQPTPAETRLEPAATPRKPYTCEQCGRGFDWKSVFVIHHRTHTSGPGVQSPGLATGESTEKPPQGEVAFPHHPRRSLTGPRSYPCEECGCSFSWKSQLVIHRKSHTGQRRHFCSDCGRAFDWKSQLVIHRKGHRPEVP

SEQ ID NO: 16174 - protein, 518 aa, Homo sapiens; identical to SEQ ID NO: 14445

SEQ ID NO: 16175 - protein, 682 aa, Homo sapiens
MTKSKEAVTFKDVAVVFSEEELQLLDLAQRKLYRDVMLENFRNVVSVGHQSTPDGLPQLEREEKLWMMKMATQRDNSSGAKNLKEMETLQEVGLRYLPHEELFCSQIWQQITRELIKYQDSVVNIQRTGCQLEKRDDLHYKDEGFSNQSSHLQVHRVHTGEKPYKGEHCVKSFSWSSHLQINQRAHAGEKPYKCEKCDNAFRRFSSLQAHQRVHSRAKSYTNDASYRSFSQRSHLPHHQRVPTGENPYKYEECGRNVGKSSHCQAPLIVHTGEKPYKCEECGVGFSQRSYLQVHLKVHTGKKPYKCEECGKSFSWRSRLQAHERIHTGEKPYKCNACGKSFSYSSHLNIHCRIHTGEKPYKCEECGKGFSVGSHLQAHQISHTGEKPYKCEECGKGFCRASNLLDHQRGHTGEKPYQCDACGKGFSRSSDFNIHFRVHTGEKPYKCEECGKGFSQASNLLAHQRGHTGEKPYKCGTCGKGFSRSSDLNVHCRIHTGEKPYKCERCGKAFSQFSSLQVHQRVHTGEKPYQCAECGKGFSVGSQLQAHQRCHTGEKPYQCEECGKGFCRASNFLAHRGVHTGEKPYRCDVCGKRFRQRSYLQAHQRVHTGERPYKCEECGKVFSWSSYLQAHQRVHTGEKPYKCEECGKGFSWSSSLIIHQRVHADDEGDKDFPSSEDSHRKTR

SEQ ID NO: 16176 - protein, 1061 aa, Homo sapiens
MGDPGSEIIESVPPAGPEASESTTDENEDDIQFVSEGPLRPVLEYIDLVSSDDEEPSTSYTDENIKRKDHIDYQKDKVALTLARLARHVEVEKQQKEEKNRAFREKIDFQHAHGLQELEFIRGHSDTEAARLCVDQWLKMPGLKTGTINCGTKSSFRRGGHTWVSGKPILCPIMHCNKEFDNGHLLLGHLKRFDHSPCDPTITLHGPFFSSFACVVCYKKFVTQQQYRDHLFDKEATDDGHNNNLLPQIIQCFACPNCFLLFSRKEECSKHMSGKNHFHQSFKLGDNKGIAHPISFPSFAKKLLISLCKDVPFQVKCVACHKTLRSHMELTAHFRVHCRNAGPVAVAEKSITQVAEKFILRGYCPDCNQVFVDETSTQNHKQNSGHKVRVINSVEESVLLYCHSSEGNKDPSSDLHLLLDQSKFSSLKRTMSIKESSSLECIAIPKKKMNLKDKSHEGVACVQKEKSVVKTWFCECNQRFPSEDAVEKHVFSANTMGYKCVVCGKVCDDSGVIRLHMSRIHGGAHLNNFLFWCRTCKKELTRKDTIMAHVTEFHNGHRYFYEMDEVEGETLPSSSTTLDNLTANKPSSAITVIDHSPANSSPRGKWQCRICEDMFDSQEYVKQHCMSLASHKFHRYSCAHCRKPFHKIETLYRHCQDEHDNEIKIKYFCGLCDLIFNVEEAFLSHYEEHHSIDYVFVSEKTETSIKTEDDFPVIETSNQLTCGCRESYICKVNRKEDYSRCLQIMLDKGKLWFRCSLCSATAQNLTDMNTHIHQVHKEKSDEEEQQYVIKCGTCTKAFHDPESAQQHFHRKHCFLQKPSVAHFGSEKSNLYKFTASASHTERKLKQAINYSKSLDMEKGVENDLSYQNIEEEIVELPDLDYLRTMTHIVFVDFDNWSNFFGHLPGHLNQGTFIWGFQGGNTNWKPPLNCKIYNYLNRIGCFFLHPRCSKRKDAADFAICMHAGRLDEQLPKQIPFTILSGDQGFLELENQFKKTQRPAHILNPHHLEGDMMCALLNSISDTTKECDSDDNMGAKNTSIGEEFISTEDVELEEAIRRSLEEM

SEQ ID NO: 16177 - protein, 522 aa, Homo sapiens
MAVSHLPTMVQESVTFKDVAILFTQEEWGQLSPAQRALYRDVMLENYSNLVSLGLLGPKPDTFSQLEKREVWMPEDTPGGFCLDWMTMPASKKSTVKAEIPEEELDQWTIKERFSSSSHWKCASLLEWQCGGQEISLQRVVLTHPNTPSQECDESGSTMSSSLHSDQSQGFQPSKNAFECSECGKVFSKSSTLNKHQKIHNEKNANQKIHIKEKRYECRECGKAFHQSTHLIHHQRIHTGEKPYECKECGKAFSVSSSLTYHQKIHTGEKPFECNLCGKAFIRNIHLAHHHRIHTGEKPFKCNICEKAFVCRAHLTKHQNIHSGEKPYKCNECGKAFNQSTSFLQHQRIHTGEKPFECNECGKAFRVNSSLTEHQRIHTGEKPYKCNECGKAFRDNSSFARHRKIHTGEKPYRCGLCEKAFRDQSALAQHQRIHTGEKPYTCNICEKAFSDHSALTQHKRIHTREKPYKCKICEKAFIRSTHLTQHQRIHTGEKPYKCNKCGKAFNQTANLIQHQRHHIGEK

SEQ ID NO: 16178 - protein, 562 aa, Homo sapiens
MAAAWMAPAQESVTFEDVAVTFTQEEWGQLDVTQRALYVEVMLETCGLLVALGDSTKPETVEPIPSHLALPEEVSLQEQLAQGVPRYSYLGQAMDQDGPSEMQEYFLRPGTDPQSEKLHGKMSLEHEGLATADGICSMMIQNQVSPEDALYGFDSYGPVTDSLIHEGENSYKFEEMFNENCFLVQHEQILPRVKPYDCPECGKAFGKSKHLLQHHIIHTGEKPYKCLECGKDFNRRSHLTRHQRTHNGDKPFVCSECGRTFNRGSHLTRHQRVHSGEKPFVCNECGKAFTYRSNFVLHNKSHNEKKPFACSECGKGFYESTALIQHFIIHTGERPFKCLECGKAFNCRSHLKQHERIHTGEKPFVCSQCGKAFTHYSTYVLHERAHTGEKPFECKECGKAFSIRKDLIRHFNIHTGEKPYECLQCGKAFTRMSGLTRHQWIHTGEKPYVCIQCGKAFCRTTNLIRHFSIHTGEKPYECVECGKAFNRRSPLTRHQRIHTAEKSHEPIQSGNVSCESTDLIQHSIIHTESSPVSAVNMETPSIAAHSSSLDINGFIVEETLPL

SEQ ID NO: 16179 - protein, 563 aa, Homo sapiens
MAHELVMFRDVAIDVSQEEWECLNPAQRNLYKEVMLENYSNLVSLGLSVSKPAVISSLEQGKEPWMVVREETGRWCPGTWKTWGFHNNFLDNNEATDINADLASRDEPQKLSPKRDIYETELSQWVNMEEFKSHSPERSIFSAIWEGNCHFEQHQGQEEGYFRQLMINHENMPIFSQHTLLTQEFYDREKISECKKCRKIFSYHLFFSHHKRTHSKELSECKECTEIVNTPCLFKQQTIQNGDKCNECKECWKAFVHCSQLKHLRIHNGEKRYECNECGKAFNYGSELTLHQRIHTGEKPYECKECGKAFRQRSQLTQHQRLHTGEKPYECKQCGKAFIRGFQLTEHLRLHTGEKPYECKECGKTFRHRSHLTIHQRIHTGEKPYECRECGKAFSYHSSFSHHQKIHSGKKPYECHECGKAFCDGLQLTLHQRIHTGEKPYECKECGKTFRQCSHLKRHQRIHTGEKPHECMICGKAFRLHSHLIQHQRIHTGEKPYECKECGKAFSYHSSFSHHQRIHSGKKPYQCGKAFNHRLQLNLHQTLHTGEKPVRFPLLPPHPSLAS

SEQ ID NO: 16180 - protein, 2506 aa, Homo sapiens
MEVLQCDGCDFRAPSYEDLKAHIQDVHTAFLQPTDVAEDNVNELRCGSVNASNQTEVEFSSIKDEFAIAEDLSGQNATSLGTGGYYGHSPGYYGQHIAANPKPTNKFFQCKFCVRYFRSKNLLIEHTRKVHGAQAEGSSSGPPVPGSLNYNIMMHEGFGKVFSCQFCTYKSPRRARIIKHQKMYHKNNLKETTAPPPAPAPMPDPVVPPVSLQDPCKELPAEVVERSILESMVKPLTKSRGNFCCEWCSYQTPRRERWCDHMMKKHRSMVKILSSLRQQQEGTNLPDVPNKSAPSPTSNSTYLTMNAASREIPNTTVSNFRGSMGNSIMRPNSSASKFSPMSYPQMKPKSPHNSGLVNLTERSRYGMTDMTNSSADLETNSMLNDSSSDEELNEIDSENGLSAMDHQTSGLSAEQLMGSDGNKLLETKGIPFRRFMNRFQCPFCPFLTMHRRSISRHIENIHLSGKTAVYKCDECPFTCKSSLKLGAHKQCHTGTTSDWDAVNSQSESISSSLNEGVVSYESSSINGRKSGVMLDPLQQQQPPQPPPPPPPPPPSQPQPLQQPQPPQLQPPHQVPPQPQTQPPPTQQPQPPTQAAPLHPYKCTMCNYSTTTLKGLRVHQQHKHSFCDNLPKFEGQPSSLPLENETDSHPSSSNTVKKSQTSILGLSSKNNFVAKASRKLANDFPLDLSPVKKRTRIDEIASNLQSKINQTKQQEDAVINVEDDEEEEEDNEVEIEVELDREEEPTEPIIEVPTSFSAQQIWVRDTSEPQKEPNFRNITHDYNATNGAEIELTLSEDEEDYYGSSTNLKDHQVSNTALLNTQTPIYGTEHNSENTDFGDSGRLYYCKHCDFNNKSARSVSTHYQRMHPYIKFSFRYILDPNDHSAVYRCLECYIDYTNFEDLQQHYGEHHPEAMNVLNFDHSDLIYRCRFCSYTSPNVRSLMPHYQRMHPTVKINNAMIFSSYVVEQQEGLNTESQTLREILNSAPKNMATSTPVARGGGLPATFNKNTPKTFTPECENQKDPLVNTVVVYDCDVCSFASPNMHSVLVHYQKKHPEEKASYFRIQKTMRMVSVDRGSALSQLSFEVGAPMSPKMSNMGSPPPPQPPPPDLSTELYYCKHCSYSNRSVVGVLVHYQKRHPEIKVTAKYIRQAPPTAAMMRGVEGPQGSPRPPAPIQQLNRSSSERDGPPVENEMFFCQHCDYGNRTVKGVLIHYQKKHRDFKANADVIRQHTATIRSLCDRNQKKPASCVLVSPSNLERDKTKLRALKCRQCSYTSPYFYALRKHIKKDHPALKATVTSIMRWAFLDGLIEAGYHCEWCIYSHTEPNGLLLHYQRRHPEHYVDYTYMATKLWAGPDPSPPSLTMPAEAKTYRCRDCVFEAVSIWDITNHYQAFHPWAMNGDESVLLDIIKEKDAVEKPILSSEELAGPVNCENSIPTPFPEQEAECPEDARLSPEKSLQLASANPAISSTPYQCTVCQSEYNNLHGLLTHYGKKHPGMKVKAADFAQDIDINPGAVYKCRHCPYINTRIHGVLTHYQKRHPSIKVTAEDFVHDVEQSADISQNDVEETSRIFKQGYGAYRCKLCPYTHGTLEKLKIHYEKYHNQPEFDVFSQSPPKLPVPLEPEMTTEVSPSQVSITEEEVGEEPVSTSHFSTSHLVSHTVFRCQLCKYFCSTRKGIARHYRIKHNNVRAQPEGKNNLFKCALCAYTNPIRKGLAAHYQKRHDIDAYYTHCLAASRTISDKPNKVIIPSPPKDDSPQLSEELRRAVEKKKCSLCSFQSFSKKGIVSHYMKRHPGVFPKKQHASKLGGYFTAVYADEHEKPTLMEEEERGNFEKAEVEGEAQEIEWLPFRCIKCFKLSFSTAELLCMHYTDHHSRDLKRDFIILGNGPRLQNSTYQCKHCDSKLQSTAELTSHLNIHNEEFQKRAKRQERRKQLLSKQKYADGAFADFKQERPFGHLEEVPKIKERKVVGYKCKFCVEVHPTLRAICNHLRKHVQYGNVPAVSAAVKGLRSHERSHLALAMFTREDKYSCQYCSFVSAFRHNLDRHMQTHHGHHKPFRCKLCSFKSSYNSRLKTHILKAHAGEHAYKCSWCSFSTMTISQLKEHSLKVHGKALTLPRPRIVSLLSSHSHHSSQKATPAEEVEDSNDSSYSEPPDVQQQLNHYQSAALARNNSRVSPVPLSGAAAGTEQKTEAVLHCEFCEFSSGYIQSIRRHYRDKHGGKKLFKCKDCSFYTGFKSAFTMHVEAGHSAVPEEGPKDLRCPLCLYHTKYKRNMIDHIVLHREERVVPIEVCRSKLSKYLQGVVFRCDKCTFTCSSDESLQQHIEKHNELKPYKCQLCYYETKHTEELDSHLRDEHKVSRNFELVGRVNLDQLEQMKEKMESSSSDDEDKEEEMNSKAEDRELMRFSDHGAALNTEKRFPCEFCGRAFSQGSEWERHVLRHGMALNDTKQVSREEIHPKEIMENSVKMPSIEEKEDDEAIGIDFSLKNETVAICVVTADKSLLENAEAKKE

SEQ ID NO: 16181 - protein, 595 aa, Homo sapiens
MRETLEALSSLGFSVGQPEMAPQSEPREGSHNAQEQMSSSREERALGVCSGHEAPTPEEGAHTEQAEAPCRGQACSAQKAQPVGTCPGEEWMIRKVKVEDEDQEAEEEVEWPQHLSLLPSPFPAPDLGHLAAAYKLEPGAPGALSGLALSGWGPMPEKPYGCGECERRFRDQLTLRLHQRLHRGEGPCACPDCGRSFTQRAHMLLHQRSHRGERPFPCSECDKRFSKKAHLTRHLRTHTGERPYPCAECGKRFSQKIHLGSHQKTHTGERPFPCTECEKRFRKKTHLIRHQRIHTGERPYQCAQCARSFTHKQHLVRHQRVHQTAGPARPSPDSSASPHSTAPSPTPSFPGPKPFACSDCGLSFGWKKNLATHQCLHRSEGRPFGCDECALGATVDAPAAKPLASAPGGPGCGPGSDPVVPQRAPSGERSFFCPDCGRGFSHGQHLARHPRVHTGERPFACTQCDRRFGSRPNLVAHSRAHSGARPFACAQCGRRFSRKSHLGRHQAVHTGSRPHACAVCARSFSSKTNLVRHQAIHTGSRPFSCPQCGKSFSRKTHLVRHQLIHGEAAHAAPDAALAAPAWSAPPEVAPPPLFF

SEQ ID NO: 16182 - protein, 522 aa, Homo sapiens
MALPQGLLTFRDVAIEFSQEEWKCLDPAQRTLYRDVMLENYRNLVSLDISSKCMLKTLSSTGQGNTEVIHTGTLHRQASHHIGEFCFHEIEKDIHGFEFQWKEDETNGHAAPMTEIKELAGSTGQHDQRHAGNKRIKDQLGSSFHLHLPEPHIFQSEGKIGNQVEKSINNASSVSTSQRICCRPKTHISNKYGNNSLHSSLLTQKWEVHMREKSFECIQSFKSFNCSSLLKKHQIIHLEEKQCKCDVCGKVFNQKRYLACHRRCHTGEKPYKCNECGKTFGHNSSLFIHKALHTGEKPYECEECDKVFSRKSHLERHKRIHTGEKPYKCKVCDEAFAYNSYLAKHTILHTGEKPYTCNECGKVFNRLSTLARHHRLHTGEKPYKCEECDKVFSRKSHLERHRRIHSGEKPYKCEECCKVFSRKSNLERHRRIHTGEKPYKCKVCDKAFQRDSHLAQHQRVHTGEKPYKCNECGKTFGQTSSLIIHRRLHTGEKPYKCNECGKTFSQMSSLVYHHRLHSGEKP

SEQ ID NO: 16183 - protein, 3925 aa, Homo sapiens
MPGERPRGAPPPTMTGDLQPRQVASSPGHPSQPPLEDNTPATRTTKGAREAGGQAQAMELPEAQPRQARDGELKPPSLRGQAPSSTPGKRGSPQTPPGRSPLQAPSRLAGRAEGSPPQRYILGIASSRTKPTLDETPENPQLEAAQLPEVDTPQGPGTGAPLRPGLPRTEAQPAAEELGFHRCFQEPPSSFTSTNYTSPSATPRPPAPGPPQSRGTSPLQPGSYPEYQASGADSWPPAAENSFPGANFGVPPAEPEPIPKGSRPGGSPRGVSFQFPFPALHGASTKPFPADVAGHAFTNGPLVFAFHQPQGAWPEEAVGTGPAYPLPTQPAPSPLPCYQGQPGGLNRHSDLSGALSSPGAAHSAPRPFSDSLHKSLTKILPERPPSAQDGLGSTRGPPSSLPQRHFPGQAYRASGVDTSPGPPDTELAAPGPPPARLPQLWDPTAAPYPTPPGGPLAATRSMFFNGQPSPGQRLCLPQSAPLPWPQVLPTARPSPHGMEMLSRLPFPAGGPEWQGGSQGALGTAGKTPGPREKLPAVRSSQGGSPALFTYNGMTDPGAQPLFFGVAQPQVSPHGTPSLPPPRVVGASPSESPLPSPATNTAGSTCSSLSPMSSSPANPSSEESQLPGPLGPSAFFHPPTHPQETGSPFPSPEPPHSLPTHYQPEPAKAFPFPADGLGAEGAFQCLEETPFPHEGPEVGRGGLQGFPRAPPPYPTHHFSLSSASLDQLDVLLTCRQCDRNYSSLAAFLAHRQFCGLLLARAKDGHQRSPGPPGLPSPPAAPRVPADAHAGLLSHAKTFLLAGDAQAEGKDDPLRTGFLPSLAATPFPLPASDLDMEDDAKLDSLITEALNGMEYQSDNPEIDSSFIDVFADEEPSGPRGPSSGHPLKSKAGVTPESKAPPPLPAATPDPQTPRPGDRGCPARGRPKTRSLGLAPTEADAPSQGRQQRRGKQLKLFRKDLDSGGAAEGSGSGGGGRASGLRPRRNDGLGERPPPRPRRPRTQAPGSRADPAPRVPRAAALPEETRSSRRRRLPPRKDPRKRKARGGAWGKELILKIVQQKNRLREYDFASESEEDEQPPPRGPGFRGRRGRGEKRKEVELTQGPREDEPQKPRKAARQEAGGDGAPANPEEPGGSRPGPGRSPQARGPSRSLETGAAAREGGPKCADRPSVAPKDPLQVPTNTETSEETRPSLDFPQEAKEPETAEESAPDSTEFTEALRSPPAACAGEMGASPGLLIPEQPPPSRHDTGTPKPSGSLANTAPHGSSPTPGVGSLLGGPGGTQAPVSHNSKDPPARQPGEFLAPVANPSSTACPKPSVLSSKISSFGCDPAGFNRDPLGVPVAKKGPQPYSSPHSELFLGPKDLAGCFLEELHPKPSARDAPPASSSCLCQDGEDAGSLEPQLPRSPPGTAETEPGRAASPPTLESSSLFPDLPVDRFDPPLYGSLSANRDSGLPFACADPPQKTVPSDPPYPSFLLLEEVSPMLPSHFPDLSGGKVLSKTCPPERTVVPGAAPSLPGKGSGCSVALMSHLSEDELEIQKLVTELESQLQRSKDTRGAPRELAEAESVGRVELGTGTEPPSQRRTCQATVPHEDTFSAADLTRVGESTAHREGAESAVATVEAVQGRPGGTWPCPASFHPGHAALLPCAQEDLVSGAPFSPRGANFHFQPVQKAGASKTGLCQAEGDSRPPQDVCLPEPSKQPGPQLDAGSLAKCSPDQELSFPKNKEAASSQESEDSLRLLPCEQRGGFLPEPGTADQPHRGAPAPEAFGSPAVHLAPDLAFQGDGAPPLDATWPFGASPSHAAQGHSAGRAGGHLHPTAGRPGFEGNEFAPAGASSLTAPRGREAWLVPVPSPACVSNTHPSRRSQDPALSPPIRQLQLPGPGVAKSKDGILGLQELTPAAQSPPRVNPSGLEGGTVEGGKVACGPAQGSPGGVQVTTLPAVAGHQLGLEADGHWGLLGQAEKTQGQGTANQLQPENGVSPGGTDNHASVNASPKTALTGPTEGAVLLEKCKGSRAAMSLQEEAEPTPSPPSPNRESLALALTAAHSRSGSEGRTPERASSPGLNKPLLATGDSPAPSVGDLAACAPSPTSAAHMPCSLGPLPREDPLTSPSRAQGGLGGQLPASPSCRDPPGPQQLLACSPAWAPLEEADGVQATTDTGAEDSPVAPPSLTTSPCDPKEALAGCLLQGEGSPLEDPSSWPPGSVSAVTCTHSGDTPKDSTLRIPEDSRKEKLWESPGRATSPPLAGAVSPSVAVRATGLSSTPTGDEAQAGRGLPGPDPQSRGAPPHTNPDRMPRGHSSYSPSNTARLGHREGQAVTAVPTEPPTLQGAGPDSPACLEGEMGTSSKEPEDPGTPETGRSGATKMPRVTCPSTGLGLGRTTAPSSTASDFQSDSPQSHRNASHQTPQGDPLGPQDLKQRSRGYKKKPASTENGQWKGQAPHGPVTCEVCAASFRSGPGLSRHKARKHRPHPGAPAEPSPAALPAQQPLEPLAQKCQPPRKKSHRVSGKERPNHSRGDPSHVTQPPPAQGSKEVLRAPGSPHSQQLHPPSPTEHEVDVKTPASKPRPDQAREDELHPKQAEKREGRRWRREPTVDSPSHSEGKSNKKRGKLRGRRLREESILPVSADVISDGRGSRPSPAMASYAASPSHCLSVEGGPEADGEQPPRLATLGPGVMEGAAETDQEALCAGETGAQKPPGDRMLCPGRMDGAALGEQPTGQKGASARGFWGPRETKALGVCKESGSEPAEDSSRAHSRSEEGVWEENTPPLGPLGFPETSSSPADSTTSSCLQGLPDNPDTQGGVQGPEGPTPDASGSSAKDPPSLFDDEVSFSQLFPPGGRLTRKRNPHVYGKRCEKPVLPLPTQPSFEEGGDPTLGPARLPTDLSDSSSLCLCHEDPWEDEDPAGLPESFLLDGFLNSRVPGIDPWAPGLSLWALEPSREAGAEKLPSHCPEDDRPEAIPELHMVPAAWRGLEMPAPADDSSSSLGDVSPEPPSLERERCDGGLPGNTHLLPLRATDFEVLSTKFEMQDLCFLGPFEDPVGLPGPSFLDFEGTASSQGPQSRRTEEAAGAGRAQGRGRPAKGRRASYKCKVCFQRFRSLGELDLHKLAHTPAPPPTCYMCVERRFGSRELLRGHLQERHAQSKAGPWACGMCLKEVADVWMYNEHLREHAVRFARRGQARRSLGDLPGGLEGSSAVAHLLNSITEPAPKHHRGKRSAGKAAGSPGDPWGQEGEAKKDSPGERAKPRARSTPSNPDGAATPDSASATALADAGSPGPPRTTPSPSPDPWAGGEPLLQATPVHEACKDPSRDCHHCGKRFPKPFKLQRHLAVHSPQRVYLCPRCPRVYPEHGELLAHLGGAHGLLERPELQHTPLYACELCATVMRIIKKSFACSSCNYTFAKKEQFDRHMNKHLRGGRQPFAFRGVRRPGAPGQKARALEGTLPSKRRRVAMPGSAPGPGEDRPPPRGSSPILSEGSLPALLHLCSEVAPSTTKGWPETLERPVDPVTHPIRGCELPSNHQECPPPSLSPFPAALADGRGDCALDGALERPENEASPGSPGPLLQQALPLGASLPRPGARGQDAEGKRAPLVFSGKRRAPGARGRCAPDHFQEDHLLQKEKEVSSSHMVSEGGPRGTFHKGSATKPAGCQSSSKDRSAASTPSKALKFPVHPRKAVGSLAPGELARGTENGMKPATPKAKPGPSSQGSGSPRPGTKTGGGSQPQPASGQLQSETATTPAKPSFPSRSPAPERLPARAQAKSCTKGPREAGEQGPHGSLGPKEKGESSTKRKKGQVPGPARSESVGSFGRAPSAPDKPPRTPRKQATPSRVLPTKPKPNSQNKPRPPPSEQRKAEPGHTQRKDRLGKAFPQGRPLLRPPKRGTAVHGAEPAEPHTHRTAEAQSDLLSQLFGQRLTGFKIPLKKDASE

SEQ ID NO: 16184 - protein, 717 aa, Homo sapiens
MKSQEEVEVAGIKLCKAMSLGSVTFTDVAIDFSQDEWEWLNLAQRSLYKKVMLENYRNLVSVGLCISKPDVISLLEQEKDPWVIKGGMNRGLCPDLECVWVTKSLSLNQDIYEEKLPPAIIMERLKSYDLECSTLGKNWKCEDLFERELVNQKTHFRQETITHIDTLIEKRDHSNKSGTVFHLNTLSYIKQIFPMEERIFNFHTDKKSLKTHSVVKKHKQDRGEKKLLKCNDCEKIFSKISTLTLHQRIHTGEKPYECIECGKAFSQSAHLAQHQRIHTGEKPFECTECGKAFSQNAHLVQHQRVHTGEKPYQCKQCNKAFSQLAHLAQHQRVHTGEKPYECIECGKAFSDCSSLAHHRRIHTGKRPYECIDCGKAFRQNASLIRHRRYYHTGEKPFDCIDCGKAFTDHIGLIQHKRTHTGERPYKCNVCGKAFSHGSSLTVHQRIHTGEKPYECNICEKAFSHRGSLTLHQRVHTGEKPYECKECGKAFRQSTHLAHHQRIHTGEKPYECKECSKTFSQNAHLAQHQKIHTGEKPYECKECGKAFSQIAHLVQHQRVHTGEKPYECIECGKAFSDGSYLVQHQRLHSGKRPYECLECGKAFRQRASLICHQRCHTGEKPYECNVCGKAFSHRKSLTLHQRIHTGEKPYECKECSKAFSQVAHLTLHKRIHTGERPYECKECGKAFRQSVHLAHHQRIHTGESSVILSSALPYHQVL

SEQ ID NO: 16185 - protein, 626 aa, Homo sapiens
MNVEVVKVMPQDLVTFKDVAIDFSQEEWQWMNPAQKRLYRSMMLENYQSLVSLGLCISKPYVISLLEQGREPWEMTSEMTRSPFSDWESIYVTQELPLKQFMYDDACMEGITSYGLECSTFEENWKWEDLFEKQMGSHEMFSKKEIITHKETITKETEFKYTKFGKCIHLENIEESIYNHTSDKKSFSKNSMVIKHKKVYVGKKLFKCNECDKTFTHSSSLTVHFRIHTGEKPYACEECGKAFKQRQHLAQHHRTHTGEKLFECKECRKAFKQSEHLIQHQRIHTGEKPYKCKECRKAFRQPAHLAQHQRIHTGEKPYECKECGKAFSDGSSFARHQRCHTGKRPYECIECGKAFRYNTSFIRHWRSYHTGEKPFNCIDCGKAFSVHIGLILHRRIHTGEKPYKCGVCGKTFSSGSSRTVHQRIHTGEKPYECDICGKDFSHHASLTQHQRVHSGEKPYECKECGKAFRQNVHLVSHLRIHTGEKPYECKECGKAFRISSQLATHQRIHTGEKPYECIECGNAFKQRSHLAQHQKTHTGEKPYECNECGKAFSQTSNLTQHQRIHTGEKPYKCTECGKAFSDSSSCAQHQRLHTGQRPYQCFECGKAFRRKLSLICHQRSHTGEEP

SEQ ID NO: 16186 - protein, 871 aa, Homo sapiens
MAEEFVTLKDVGMDFTLGDWEQLGLEQGDTFWDTALDNCQDLFLLDPPRPNLTSHPDGSEDLEPLAGGSPEATSPDVTETKNSPLMEDFFEEGFSQEIIEMLSKDGFWNSNFGEACIEDTWLDSLLGDPESLLRSDIATNGESPTECKSHELKRGLSPVSTVSTGEDSMVHNVSEKTLTPAKSKEYRGEFFSYSDHSQQDSVQEGEKPYQCSECGKSFSGSYRLTQHWITHTREKPTVHQECEQGFDRNASLSVYPKTHTGYKFYVCNEYGTTFSQSTYLWHQKTHTGEKPCKSQDSDHPPSHDTQPGEHQKTHTDSKSYNCNECGKAFTRIFHLTRHQKIHTRKRYECSKCQATFNLRKHLIQHQKTHAAKTTSECQECGKIFRHSSLLIEHQALHAGEEPYKCNERGKSFRHNSTLKIHQRVHSGEKPYKCSECGKAFHRHTHLNEHRRIHTGYRPHKCQECVRSFSRPSHLMRHQAIHTAEKPYSCAECKETFSDNNRLVQHQKMHTVKTPYECQECGERFICGSTLKCHESVHAREKQGFFVSGKILDQNPEQKEKCFKCNKCEKTFSCSKYLTQHERIHTRGVKPFECDQCGKAFGQSTRLIHHQRIHSRVRLYKWGEQGKAISSASLIKLQSFHTKEHPFKCNECGKTFSHSAHLSKHQLIHAGENPFKCSKCDRVFTQRNYLVQHERTHARKKPLVCNECGKTFRQSSCLSKHQRIHSGEKPYVCDYCGKAFGLSAELVRHQRIHTGEKPYVCQECGKAFTQSSCLSIHRRVHTGEKPYRCGECGKAFAQKANLTQHQRIHTGEKPYSCNVCGKAFVLSAHLNQHLRVHTQETLYQCQRCQKAFRCHSSLSRHQRVHNKQQYCL

SEQ ID NO: 16187 - protein, 364 aa, Homo sapiens
MERGKKKRISNKLQQTFHHSKEPTFLINQAGLLSSDSYSSLSPETESVNPGENIKTDTQKKRPGTVILSKLSSRRIISESQLSPPVIPARRPGFRVCYICGREFGSQSIAIHEPQCLQKWHIENSKLPKHLRRPEPSKPQSLSSSGSYSLQATNEAAFQSAQAQLLPCESCGRTFLPDHLLVHHRSCKPKGEGPRAPHSNSSDHLTGLKKACSGTPARPRTVICYICGKEFGTLSLPIHEPKCLEKWKMENDRLPVELHQPLPQKPQPLPNAQSSQAGPNQAQLVFCPHCSRIFTSDRLLVHQRSCKTHPYGPKYQNLNLGSKGGLKEYTNSKQQRNRAAPSVTDKVIHATQDALGEPGGALCL

SEQ ID NO: 16188 - protein, 1883 aa, Homo sapiens; identical to SEQ ID NO: 15972

SEQ ID NO: 16189 - protein, 524 aa, Homo sapiens
MAKRPGPPGSREMGLLTFRDIAIEFSLEEWQCLDCAQRNLYRDVMLENYRNLVSLGIAVSKPDLITCLEQNKESQNIKRNEMVAKHPVTRSHFTQDLQPEQGIKDSLQKVIPRTYGKCGHEKLQFKKCCKSVGEYEVHKGGYSEVNQCLSTTQNKIFQTHKYVKVFGKFSNSNRDKTRYTGNKHFKCNKYGKSFCMLSHLNQHQVIHTREKSYKCKECGKSFNCSSNHTTHKIIHTGEKPYRCEECGKAFSWSANLTRHKRTHTGEKPYTCEECGQAFRRSSALTNHKRIHTGERPYKCEECGKAFSVSSTLTDHKRIHTGEKPCRCEECGKAFSWSSNLTRHKRIHTREKPYACEECGQAFSLSSNLMRHRRIHTGEKPYTCEECGQDFRRSSALTIHKRIHTGERPYKCEECGKVFSLSSTLTDHKRIHTGERPYKCEECGKAFSLSSTLTDHKRIHTGERPYTCEECGKAFNCSSTLMQHKRIHTGEKPYKCEECEQAFKWHSSLAKHKIIHTGEKPYKCE

SEQ ID NO: 16190 - protein, 618 aa, Homo sapiens
MERAVEPWGPDLHRPEEREPQRGARTGLGSENVISQPNEFEHTPQEDDLGFKEEDLAPDHEVGNASLKPEGIQNWDDLWVQREGLGKPQPRDRGPRLLGEPRWGQASSDRAAVCGECGKSFRQMSDLVKHQRTHTGEKPYKCGVCGKGFGDSSARIKHQRTHSGEKPYRARPPAQGPPKIPRSRIPAGERPTICGECGKSFRQSSDLVKHQRTHTGEKPYKCGICGKGFGDSSARIKHQRTHRGEQPPRPVVPRRQPSRAATAATQGPKAQDKPYICTDCGKRFVLSCSLLSHQRSHLGPKPFGCDVCGKEFARGSDLVKHLRVHTGEKPYLCPECGKGFADSSARVKHLRTHSGERPHACPECDRTFSLSSTLLRHRLTHMEPQDFSFPGYPLPALIPSPPPPPLGTSPPLTPRSPSHSGEPFGLPGLEPEPGGPQAGEPPPPLAGDKPHKCPECGKGFRRSSDLVKHHRVHTGEKPYLCPECGKGFADSSARVKHLRTHRGERARPPPPSTLLRPHNPPGPVPMAPRPRVRAQPSGPSQPHVCGFCGKEFPRSSDLVKHRRTHTGEKPYKCAECGKGFGDSSARIKHQRGHLVLTPFGIGDGRARPLKQEAATGLE

SEQ ID NO: 16191 - protein, 535 aa, Homo sapiens
MLCDEKAQKRRKRKAKESGMALPQGHLTFRDVAIEFSQAEWKCLDPAQRALYKDVMLENYRNLVSLGISLPDLNINSMLEQRREPWSGESEVKIAKNSDGRECIKGVNTGSSYALGSNAEDKPIKKQLGVSFHLHLSELELFPDERVINGCNQVENFINHSSSVSCLQEMSSSVKTPIFNRNDFDDSSFLPQEQKVHLREKPYECNEHSKVFRVSSSLTKHQVIHTVEKPYKCNSCGKVFSRNSHLAEHCRIHTGEKPYKCNVCGKVFSYNSNFARHQRIHTREKPYECNECGKVFSNNSYLARHQRIHAEEKPYKCNECGKGFSHKSSLANHWRIYTGEKPYKCDECGKAFYRIALLVRHQKIHTGEKPYKCNECGKVFIQNSHLAQHWRIHTGEKPYKCNECGKVFNQLSNLARHRRIHTGEKPYKCNECGKAFSEYSGLSAHLVIHTGEKPYKCSECGKAFRHKLSLTNHQRIHTGERPYKCNECGKVFNRIAHLARHRKIHTGEKPYKCNECGKAFSRISYLAQHWTIHMG

SEQ ID NO: 16192 - protein, 744 aa, Homo sapiens
MQAVVPLNKMTAISPEPQTLASTEQNEVPRVVTSGEQEAILRGNAADAESFRQRFRWFCYSEVAGPRKALSQLWELCNQWLRPDIHTKEQILELLVFEQFLTILPGEIRIWVKSQHPESSEEVVTLIEDLTQMLEEKDPVSQDSTVSQEENSKEDKMVTVCPNTESCESITLKDVAVNFSRGEWKKLEPFQKELYKEVLLENLRNLEFLDFPVSKLELISQLKWVELPWLLEEVSKSSRLDESALDKIIERCLRDDDHGLMEESQQYCGSSEEDHGNQGNSKGRVAQNKTLGSGSRGKKFDPDKSPFGHNFKETSDLIKHLRVYLRKKSRRYNESKKPFSFHSDLVLNRKEKTAGEKSRKSNDGGKVLSHSSALTEHQKRQKIHLGDRSQKCSKCGIIFIRRSTLSRRKTPMCEKCRKDSCQEAALNKDEGNESGEKTHKCSKCGKAFGYSASLTKHRRIHTGEKPYMCNECGKAFSDSSSLTPHHRTHSGEKPFKCDDCGKGFTLSAHLIKHQRIHTGEKPYKCKDCGRPFSDSSSLIQHQRIHTGEKPYTCSNCGKSFSHSSSLSKHQRIHTGEKPYKCGECGKAFRQNSCLTRHQRIHTGEKPYLCNDCGMTFSHFTSVIYHQRLHSGEKPYKCNQCEKAFPTHSLLSRHQRIHTGVKPYKCKECGKSFSQSSSLNEHHRIHTGEKPYECNYCGATFSRSSILVEHLKIHTGRREYECNECEKTFKSNSGLIRHRGFHSAE

SEQ ID NO: 16193 - protein, 852 aa, Homo sapiens
MTKSLESVSFKDVTVDFSRDEWQQLDLAQKSLYREVMLENYFNLISVGCQVPKPEVIFSLEQEEPCMLDGEIPSQSRPDGDIGFGPLQQRMSEEVSFQSEININLFTRDDPYSILEELWKDDEHTRKCGENQNKPLSRVVFINKKTLANDSIFEYKDIGEIVHVNTHLVSSRKRPHNCNSCGKNLEPIITLYNRNNATENSDKTIGDGDIFTHLNSHTEVTACECNQCGKPLHHKQALIQQQKIHTRESLYLFSDYVNVFSPKSHAFAHESICAEEKQHECHECEAVFTQKSQLDGSQRVYAGICTEYEKDFSLKSNRQKTPYEGNYYKCSDYGRAFIQKSDLFRCQRIHSGEKPYEYSECEKNLPQNSNLNIHKKIHTGGKHFECTECGKAFTRKSTLSMHQKIHTGEKPYVCTECGKAFIRKSHFITHERIHTGEKPYECSDCGKSFIKKSQLHVHQRIHTGENPFICSECGKVFTHKTNLIIHQKIHTGERPYICTVCGKAFTDRSNLIKHQKIHTGEKPYKCSDCGKSFTWKSRLRIHQKCHTGERHYECSECGKAFIQKSTLSMHQRIHRGEKPYVCTECGKAFFHKSHFITHERIHTGEKPYECSICGKSFTKKSQLHVHQQIHTGEKPYRCAECGKAFTDRSNLFTHQKIHTGEKPYKCSDCGKAFTRKSGLHIHQQSHTGERHYECSECGKAFARKSTLIMHQRIHTGEKPYICNECGKSFIQKSHLNRHRRIHTGEKPYECSDCGKSFIKKSQLHEHHRIHTGEKPYICAECGKAFTIRSNLIKHQKIHTKQKPYKCSDLGKALNWKPQLSMPQKSDNGEVECSMPQLWCGDSEGDQGQLSSI

SEQ ID NO: 16194 - protein, 441 aa, Homo sapiens
MAPRAQIQGPLTFGDVAVAFTRIEWRHLDAAQRALYRDVMLENYGNLVSVGLLSSKPKLITQLEQGAEPWTEVREAPSGTHAVEDYWFETKMSALKQSTSEASVLGERTKSVMMEKGLDWEGRSSTEKNYKCKECGKVFKYNSSFISHQRNHTSEKPHKCKECGIAFMNSSSLLNHHKVHAGKQPYRCIECGKFLKKHSTFINHQRIHSREKPHKCIECGKTFRKNSILLSHQRIHTGQKPYKCNDCGKAFAQNAALTRHERIHSGEKPFKCNKCGRAFRDNSTVLEHQKIHTGEKPYQCNECGKAFRKSSTLISHQRMHTGEKPYHCSKCGKSFRYSSSFAGHQKTHSGNKPYQCRDCGKAFTKSSTLTGHQRIHTGEKPYHCKKCGKAFRHSSGLVEHQRLHTGEKPYKCNECGKAFPRSSALKQHKKIHNKERAMKCS

SEQ ID NO: 16195 - protein, 463 aa, Homo sapiens
MPGPLRSLEMESLQFRDVAVEFSLEEWHCLDTAQQNLYRDVMLENYRHLVFLGIIVSKPDLITCLEQGIKPLTMKRHEMIAKPPVVCSHFAQDLWPEQSIKDSYQKVILRKFEKCGHGNLHFKKGCESVDECKLHKRGYNGLNQCLTTTQSKIFQCGKYVKVFHQFSNSKRHKRRHTEKKPLKYIEGDKAFNQSSTHTTHKKIDTGEKPYKCEECGKAFNRSSHLTTHKITHTREKPYKCEECGKVFKYFSSFTTHKKIHSGEKPYICEECGKAFMYPYTLTTHKIIHTGEQPYKCKECDKAFNHPATLSSHKKIHTGEKPYTCDKCGKAFISSSILSKHEKIHTGEKPYKCEECGKAFTRSSHLTMHKIIHTGEKPYKCEECGKAFTWSAGLHKHRRTHTGEKPYKCEECGKAYTTSSNLTEHKTTHTGEKPYKCKECGKAFNWSSDLNKHKRIHIGQKPRT

SEQ ID NO: 16196 - protein, 448 aa, Homo sapiens [sequence omitted]

SEQ ID NO: 16197 - protein, 340 aa, Homo sapiens; identical to SEQ ID NO: 14448

SEQ ID NO: 16198 - protein, 529 aa, Homo sapiens
MRRNSSLSFQMERPLEEQVQSKWSSSQGRTGTGGSDVLQMQNSEHHGQSIKTQTDSISLEDVAVNFTLEEWALLDPGQRNIYRDVMRATFKNLACIGEKWKDQDIEDEHKNQGRNLRSPMVEALCENKEDCPCGKSTSQIPDLNTNLETPTGLKPCDCSVCGEVFMHQVSLNRHMRSHTEQKPNECHEYGEKPHKCKECGKTFTRSSSIRTHERIHTGEKPYECKECGKAFAFLFSFRNHIRIHTGETPYECKECGKAFRYLTALRRHEKNHTGEKPYKCKQCGKAFIYYQPFLTHERTHTGEKPYECKQCGKAFSCPTYLRSHEKTHTGEKPFVCRECGRAFFSHSSLRKHVKTHTGVQPYTCKKCGEAFKSSSSCEVHERTHFGEKPYECKQCGKAFNSSSYLQLHERVHTGEKTYECKECGKAFLYSTHFRIHERTHTREKPYECKQCGRVFIYFSHLRRHERSHTGVKPCECKQCGKAFTCLNSLKVHKRIHTGERPFQCRQCGKAFSYSKSLHVHERTHSRQKP

SEQ ID NO: 16199 - protein, 437 aa, Homo sapiens
MGERLFESAEGSQCGETFTQVPEDMLNKKTLPGVKSCESGTCGEIFMGYSSFNRNIRTDTGHQPHKCQKFLEKPYKHKQRRKALSHSHCFRTHERPHTREKPFDCKECEKSFISPASIRRYMVTHSGDGPYKCKFCGKALDCLSLYLTHERTHTGEKRYECKQCGKAFSWHSSVRIHERTHTGEKPYECKECGKSFNFSSSFRRHERTHTGEKPYKCKECGKAFNCPSSFHRHERTHTGEKPYECKLYGKALSRLISFRRHMRMHTGERPHKCKICGKAFYSPSSFQRHERSHTGEKPYKCKQCGKAFTCSTSFQYHERTHTGEKPDGCKQCGKAFRSAKYIRIHGRTHTGEKPYECKQCGKAFHCVSSFHRHERTHAGEKPYECKHCGKAFTCSIYIRIHERIHTGEKPYQCKECGKAFIRSSYCRKHERTHTINI

SEQ ID NO: 16200 - protein, 531 aa, Homo sapiens
MLENYRNLVFVGIAASKPDLITCLEQGKEPWNVKRHEMVAEPPVVCSYFARDLWPKQGKKNYFQKVILRRYKKCGCENLQLRKYCKSMDECKVHKECYNGLNQCLTTTQNKIFQCDKYVKVFHKFSNSNRHTIRHTGKKSFKCKECEKSFCMLSHLAQHKRIHSGEKPYKCKECGKAYNETSNLSTHKRIHTGKKPYKCEECGKAFNRLSHLTTHKIIHTGKKPYKCEECGKAFNQSANLTTHKRIHTGEKPYKCEECGRAFSQSSTLTAHKIIHAGEKPYKCEECGKAFSQSSTLTTHKIIHTGEKFYKCEECGKAFSQLSHLTTHKRIHSGEKPYKCEECGKAFKQSSTLTTHKRIHAGEKFYKCEVCSKAFSRFSHLTTHKRIHTGEKPYKCEECGKAFNLSSQLTTHKIIHTGEKPYKCEECGKAFNQSSTLSKHKVIHTGEKPYKYEECGKAFNQSSHLTTHKMIHTGEKPYKCEECGKAFNNSSILNRHKMIHTGEKLYKPESCNNACDNIAKISKYKRNCAGEK

SEQ ID NO: 16201 - protein, 646 aa, Homo sapiens
MNECNVHKEGYNELNQYLTTTQSKIFQCDKYVKVFHKLLNSNRHNTKHTGKKPFKCKKCGKSFCMLLHLCQHKRIHIRENSYRCEECGKAFIWFSTLTRHRRVHTGEKSYKYECGKSFNQDSNLTTHKRIHTGQKPYKCEECGTSFYQFSYLTRHKLIHTREKPYKCEQYGKTFNQSSTLTGHKIIHNGEKPYKCEECGKAFSIFSTPTKHKIIHTEEKSHRCEEYCKAYKESSHLTTHKRIHTGEKPYKCEECGKAFSIFSTLTKHKIIHTEEKSHRCEECGKAYKESSHLTTHKRIHTGEKPYKCEECGKTFSVFSILTKHKIIHTEEKPYKCEECGKAFKRSSTLTKHRIIHTEEKPYKCEECGKAFNQSSTLSIHKIIHTGEKPYKCEECGKAFKRSSTLTIHKMIHTGEKPYKCEECGKAFNRSSHLTTHKRIHTGHKPYKCKECGKSFSVFSTLTKHKIIHTDKKPYKCEECGKAFNRSSILSIHKKIHTGEKPYKCEECGKAFKRSSHLAGHKQIHSVQKPYKCEECGKAFSIFSTLTKHKIIHTEEKPYKCEKCGKTFYRFSNLNTHKIIHTGEKPCKCEECGKAFNHSSNLIKHKLIHTGDKPYKCEACGKAFRRSSHLSRHKIIHIGIHTEETVQK

SEQ ID NO: 16202 - protein, 587 aa, Homo sapiens
MPTALCPRVLAPKESEEPRKMRSPPGENPSPQGELPSPESSRRLFRRFRYQEAAGPREALQRLWDLCGGWLRPERHTKEQILELLVLEQFLAILPREIQSWVRAQEPESGEQAVAAVEALEREPGRPWQWLKHCEDPVVIDDGDSPLDQEQEQLPVEPHSDLAKNQDAQPITLAQCLGLPSRPPSQLSGDPVLQDAFLLQEENVRDTQQVTTLQLPPSRVSPFKDMILCFSEEDWSLLDPAQTGFYGEFIIGEDYGVSMPPNDLAAQPDLSQGEENEPRVPELQDLQGKEVPQVSYLDSPSLQPFQVEERRKREELQVPEFQACPQTVVPQNTYPAGGNPRSLENSLDEEVTIEIVLSSSGDEDSQHGPYCTEELGSPTEKQRSLPASHRSSTEAGGEVQTSKKSYVCPNCGKIFRWRVNFIRHLRSRREQEKPHECSVCGELFSDSEDLDGHLESHEAQKPYRCGACGKSFRLNSHLLSHRRIHLQPDRLQPVEKREQAASEDADKGPKEPLENGKAKLSFQCCECGKAFQRHDHLARHRSHFHLKDKARPFQCRYCVKSFTQNYDLLRHERLHMKRRSKQALNSY

SEQ ID NO: 16203 - protein, 498 aa, Homo sapiens
MESPRGWTLQVAPEEGQVLCNVKTATRGLSEGAVSGGWGAWENSTEVPREAGDGQRQQATLGAADEQGGPGRELGPADGGRDGAGPRSEPADRALRPSPLPEEPGCRCGECGKAFSQGSYLLQHRRVHTGEKPYTCPECGKAFAWSSNLSQHQRIHSGEKPYACRECGKAFRAHSQLIHHQETHSGLKPFRCPDCGKSFGRSTTLVQHRRTHTGEKPYECPECGKAFSWNSNFLEHRRVHTGARPHACRDCGKAFSQSSNLAEHLKIHAGARPHACPDCGKAFVRVAGLRQHRRTHSSEKPFPCAECGKAFRESSQLLQHQRTHTGERPFECAECGQAFVMGSYLAEHRRVHTGEKPHACAQCGKAFSQRSNLLSHRRTHSGAKPFACADCGKAFRGSSGLAHHRLSHTGERPFACAECGKAFRGSSELRQHQRLHSGERPFVCAHCSKAFVRKSELLSHRRTHTGERPYACGECGKPFSHRCNLNEHQKRHGGRAAP

SEQ ID NO: 16204 - protein, 480 aa, Homo sapiens
MATVPGLQPLPTLEQDLEQEEILIVKVEEDFCLEEEPSVETEDPSPETFRQLFRLFCYQEVAGPREALSRLWELCCRWLRPELRTKEQILELLVLEQFLTVLPGEIQARVREQQPESGEEAVVLVEGLQRKPRKHRQRGSELLSDDEVPLGIGGQFLKHQAEAQPEDLSLEEEARFSSQQPPAQLSHRPQRGPLLWPERGPPAPRHQEMASASPFLSAWSQVPVNLEDVAVYLSGEEPRCMDPAQRDAPLENEGPGIQLEDGGDGREDAPLRMEWYRVLSARCQGPGHPLPGQRPAPVRGLVRPDQPRGGPPPGRRASHGADKPYTCPECGKGFSKTSHLTKHQRTHTGERPYKCLVCGKGFSDRSNFSTHQRVHTGEKPYPCPECGKRFSQSSSLVIHRRTHSGERPYACTQCGKRFNNSSHFSAHRRTHTGEKPYTCPACGRGFRRGTDLHKHQRTHMGAGSLPTLQPVAPGGPGAKA

SEQ ID NO: 16205 - protein, 271 aa, Homo sapiens
MNSSQISLRMKHGRVNMQKKPSKCSECGKFFTQRSSLTQHQRIHRGEKPYVCSECGSCFRKQSNLTQHLRIHTGEKPYKCNECEKAFQTKAILVQHLRIHTGEKPYKCNECGKAFCQSPSLIKHQRIHTGEKPYKCTECGKAFSQSICLTRHQRSHSGDKPFKCNECGKAFNQSACLMQHQRIHSGEKPYTCTECGKAFTQNSSLVEHERTHTGEKLYKCSECEKTFRKQAHLSEHYRIHTGEKPYECVGCGKSFRHSSALLRHQRLHAGE

SEQ ID NO: 16206 - protein, 544 aa, Homo sapiens
MLNMQGAEERDIRRETCPGWVNKNKPALEQDVCKIDSSGIVVKRFQEDEYQDSTFEEKYACEGMKENSPREIAESCLFQEGGFGRITFIHKEAPPEIISQGYNFEKSLLLTSSLVTRLRVSTEESLHQWETSNIQTNDISDQSKCPTLCTQKKSWKCNECGKTFTQSSSLTQHQRTHTGERPYTCEECGKAFSRSSFLVQHQRIHTGVKPYGCEQCGKTFRCRSFLTQHQRIHTGEKPYKCNECGNSFRNHSHLTEHQRIHTGEKPYKCNRCGKAFNQNTHLIHHQRIHTGEKPYICSECGSSFRKHSNLTQHQRIHTGEKPHKCDECGKTFQTKANLSQHQRIHSGEKPYKCKECGKAFCQSPSLIKHQRIHTGEKPYKCKECGKAFTQSTPLTKHQRIHTGERPYKCSECGKAFIQSICLIRHQRSHTGEKPYKCNECGKGFNQNTCLTQHMRIHTGEKPYKCKECGKAFAHSSSLTEHHRTHTGEKLYKCSECEKTFRKYAHLSEHYRIHTGEKPYECIECGKFFRHSSVLFRHQKLHSGD

SEQ ID NO: 16207 - protein, 646 aa, Homo sapiens
MSTAPSLSALRSSKHSGGGGGGGGGGGADPAWTSALSGNSSGPGPGSSPAGSTKPFVHAVPPSDPLRQANRLPIKVLKMLTARTGHILHPEYLQPLPSTPVSPIELDAKKSPLALLAQTCSQIGKPDPSPSSKLSSVASNGGGAGGAGGGAAGDKDTKSGPLKLSDIGVEDKSSFKPYSKPGSDKKEPGGGGGGGGGGGGGGGGVSSEKSGFRVPSATCQPFTPRTGSPSSSASACSPGGMLSSAGGAPEGKDDKKDTDVGGGGKGTGGASAEGGPTGLAHGRISCGGGINVDVNQHPDGGPGGKALGSDCGGSSGSSSGSGPSAPTSSSVLGSGLVAPVSPYKPGQTVFPLPPAGMTYPGSLAGAYAGYPPQFLPHGVALDPTKPGSLVGAQLAAAAAGSLGCSKPAGSSPLAGASPPSVMTASLCRDPYCLSYHCASHLAGAAAASASCAHDPAAAAAALKSGYPLVYPTHPLHGVHSSLTAAAAAGATPPSLAGHPLYPYGFMLPNDPLPHICNWVSANGPCDKRFATSEELLSHLRTHTAFPGTDKLLSGYPSSSSLASAAAAAMACHMHIPTSGAPGSPGTLALRSPHHALGLSSRYHPYSKSPLPTPGAPVPVPAATGPYYSPYALYGQRLTTASALGYQ

SEQ ID NO: 16208 - protein, 444 aa, Homo sapiens
MGPLQFRDVAIEFSLEEWHCLDAAQRNLYRDVMLENYRNLIFLGIVVSKPNLITCLEQGKKPLTMKRHEMIAKPPVMYSHFAQDLWSEQSIKDSFQKVILRRYEKCRHDNLQLKKGCESVDECPVHKRGYNGLKQCLATTQRKIFQCDEYVKFLHKFSNSNKHKIRDTGKKSFKCIEYGKTFNQSSTRTTYKKIDAGEKRYKCEECGKAYKQSSHLTTHKKIHTGEKPYKCEECGKAYKQSCNLTTHKIIHTGEKPYRCRECGKAFNHPATLFSHKKIHTGEKPYKCDKCGKAFISSSTLTKHEIIHTGEKPYKCEECGKAFNRSSNLTKHKRIHTGDVPYKCDECGKTFTWYSSLSKHKRAHTGEKPYKCEECGKAFTAFSTLTEHKIIHTGEKPYKCEECGKAFNWSSALNKHKKIHIRQKPCIVKNVENLLNVPQPLISIR

SEQ ID NO: 16209 - protein, 953 aa, Homo sapiens
MEESSSVAMLVPDIGEQEAILTAESIISPSLEIDEQRKTKPDPLIHVIQKLSKIVENEKSQKCLLIGKKRPRSSAATHSLETQELCEIPAKVIQSPAADTRRAEMSQTNFTPDTLAQNEGKAMSYQCSLCKFLSSSFSVLKDHIKQHGQQNEVILMCSECHITSRSQEELEAHVVNDHDNDANIHTQSKAQQCVSPSSSLCRKTTERNETIPDIPVSVDNLQTHTVQTASVAEMGRRKWYAYEQYGMYRCLFCSYTCGQQRMLKTHAWKHAGEVDCSYPIFENENEPLGLLDSSAAAAPGGVDAVVIAIGESELSIHNGPSVQVQICSSEQLSSSSPLEQSAERGVHLSQSVTLDPNEEEMLEVISDAEENLIPDSLLTSAQKIISSSPNKKGHVNVIVERLPSAEETLSQKRFLMNTEMEEGKDLSLTEAQIGREGMDDVYRADKCTVDIGGLIIGWSSSEKKDELMNKGLATDENAPPGRRRTNSESLRLHSLAAEALVTMPIRAAELTRANLGHYGDINLLDPDTSQRQVDSTLAAYSKMMSPLKNSSDGLTSLNQSNSTLVALPEGRQELSDGQVKTGISMSLLTVIEKLRERTDQNASDDDILKELQDNAQCQPNSDTSLSGNNVVEYIPNAERPYRCRLCHYTSGNKGYIKQHLRVHRQRQPYQCPICEHIADNSKDLESHMIHHCKTRIYQCKQCEESFHYKSQLRNHEREQHSLPDTLSIATSNEPRISSDTADGKCVQEGNKSSVQKQYRCDVCDYTSTTYVGVRNHRRIHNSDKPYRCSLCGYVCSHPPSLKSHMWKHASDQNYNYEQVNKAINDAISQSGRVLGKSPGKTQLKSSEESADPVTGSSENAVSSSELMSQTPSEVLGTNENEKLSPTSNTSYSLEKISSLAPPSMEYCVLLFCCCICGFESTSKENLLDHMKEHEGEIVNIILNKDHNTALNTN

SEQ ID NO: 16210 - protein, 683 aa, Homo sapiens
MSPHPEAITDCVTLNTVGQLAEGGYPLRFSTLFQEQQKMNISQASVSFKDVTIEFTQEEWQQMAPVQKNLYRDVMLENYSNLVSVGYCCFKPEVIFKLEQGEEPWFSEEEFSNQSHPKDYRGDDLIKQNKKIKDKHLEQAICINNKTLTTEEEKVLGKPFTLHVAAVASTKMSCKCNSWEVNLQSISEFIINNRNYSTKKIGCGNVCENSPFKINFEKTQTGEKFYEHNKNMKALNYNENLPKHPKFQTLEQAFECNKIGKAFNDKANCVKHNSSHTGETSSKDDEFRKNCDKKTLFDHRRTGTGKKHLHLNQCGKSFEKSTVEEYNKLNMGIKHYELNPSGNNFNRKAHLTDPQTAVIEENPLVSNDRTQTWVKSSEYHENKKSYQTSVHRVRRRSHSMMKPYKCNECGKSFCQKGHLIQHQRTHTGEKPFECSECGKTFSQKSHLSTHQRIHTAEKPYKCNECGKTFVQKSTLRGHQRIHTGEKPYECSECGKTFVQKSTLRDHHRIHTGEKSFQCNQCGKTFGQKSNLRIHQRTHTGEKTYQCNECEKSFWRKDHLIQHQKTHTGEKPFKCNECGKTFARTSTLRVHQRIHTGEKPFKCNECGKKFVRKAILSDHQRIHTGEKPFQCNKCGKTFGQKSNLRIHQRTHSGEKSYECNEYGKLCKKSTLSLYQKIQGEGNPY

SEQ ID NO: 16211 - protein, 262 aa, Homo sapiens; identical to SEQ ID NO: 14450

SEQ ID NO: 16212 - protein, 567 aa, Homo sapiens
MSSRLGAVPATSGPTTFKQQRSTRIVGAKNSRTQCSIKDNSFQYTIPHDDSLSGSSSASSCEPVSDFPASFRKSTYWMKMRRIKPAATSHVEGSGGVSAKGKRKPRQEEDEDYREFPQKKHKLYGRKQRPKTQPNPKSQARRIRKEPPVYAAGSLEEQWYLEIVDKGSVSCPTCQAVGRKTIEGLKKHMENCKQEMFTCHHCGKQLRSLAGMKYHVMANHNSLPILKAGDEIDEPSERERLRTVLKRLGKLRCMRESCSSSFTSIMGYLYHVRKCGKGAAELEKMTLKCHHCGKPYRSKAGLAYHLRSEHGPISFFPESGQPECLKEMNLESKSGGRVQRRSAKIAVYHLQELASAELAKEWPKRKVLQDLVPDDRKLKYTRPGLPTFSQEVLHKWKTDIKKYHRIQCPNQGCEAVYSSVSGLKAHLGSCTLGNFVAGKYKCLLCQKEFVSESGVKYHINSVHAEDWFVVNPTTTKSFEKLMKIKQRQQEEEKRRQQHRSRRSLRRRQQPGIELPETELSLRVGKDQRRNNEELVVSASCKEPEQEPVPAQFQKVKPPKTNHKRGRK

SEQ ID NO: 16213 - protein, 892 aa, Homo sapiens
MTDPFCVGGRRLPGSSKSGPGKDGSRKEVRLPMLHDPPKMGMPVVRGGQTVPGQAPLCFDPGSPASDKTEGKKKGRPKAENQALRDIPLSLMNDWKDEFKAHSRVKCPNSGCWLEFPSIYGLKYHYQRCQGGAISDRLAFPCPFCEAAFTSKTQLEKHRIWNHMDRPLPASKPGPISRPVTISRPVGVSKPIGVSKPVTIGKPVGVSKPIGISKPVSVGRPMPVTKAIPVTRPVPVTKPVTVSRPMPVTKAMPVTKPITVTKSVPVTKPVPVTKPITVTKLVTVTKPVPVTKPVTVSRPIVVSKPVTVSRPIAISRHTPPCKMVLLTRSENKAPRATGRNSGKKRAADSLDTCPIPPKQARPENGEYGPSSMGQSSAFQLSADTSSGSLSPGSRPSGGMEALKAAGPASPPEEDPERTKHRRKQKTPKKFTGEQPSISGTFGLKGLVKAEDKARVHRSKKQEGPGPEDARKKVPAAPITVSKEAPAPVAHPAPGGPEEQWQRAIHERGEAVCPTCNVVTRKTLVGLKKHMEVCQKLQDALKCQHCRKQFKSKAGLNYHTMAEHSAKPSDAEASEGGEQEERERLRKVLKQMGRLRCPQEGCGAAFSSLMGYQYHQRRCGKPPCEVDSPSFPCTHCGKTYRSKAGHDYHVRSEHTAPPPEEPTDKSPEAEDPLGVERTPSGRVRRTSAQVAVFHLQEIAEDELARDWTKRRMKDDLVPETARLNYTRPGLPTLNPQLLEAWKNEVKEKGHVNCPNDCCEAIYSSVSGLKAHLASCSKGAHLAGKYRCLLCPKEFSSESGVKYHILKTHAENWFRTSADPPPKHRSQDSLVPKKEKKKNLAGGKKRGRKPKERTPEEPVAKLPPRRDDWPPGCRDKGARGSTGRKVGVSKAPEK

SEQ ID NO: 16214 - protein, 541 aa, Homo sapiens
MPRRKQSHPQPVKCEGVKVDTEDSLDEGPGALVLESDLLLGQDLEFEEEEEEEEGDGNSDQLMGFERDSEGDSLGARPGLPYGLSDDESGGGRALSAESEVEEPARGPGEARGERPGPACQLCGGPTGEGPCCGAGGPGGGPLLPPRLLYSCRLCTFVSHYSSHLKRHMQTHSGEKPFRCGRCPYASAQLVNLTRHTRTHTGEKPYRCPHCPFACSSLGNLRRHQRTHAGPPTPPCPTCGFRCCTPRPARPPSPTEQEGAVPRRPEDALLLPDLSLHVPPGGASFLPDCGQLRGEGEGLCGTGSEPLPELLFPWTCRGCGQELEEGEGSRLGAAMCGRCMRGEAGGGASGGPQGPSDKGFACSLCPFATHYPNHLARHMKTHSGEKPFRCARCPYASAHLDNLKRHQRVHTGEKPYKCPLCPYACGNLANLKRHGRIHSGDKPFRCSLCNYSCNQSMNLKRHMLRHTGEKPFRCATCAYTTGHWDNYKRHQKVHGHGGAGGPGLSASEGWAPPHSPPSVLSSRGPPALGTAGSRAVHTDSS

SEQ ID NO: 16215 - protein, 400 aa, Homo sapiens
MTFEDVAVEFSQWEWGQLNPAQKDLYREVMLENFRNLAILGLLVSKPYVICQLEEGGEPFMVEREISTGAHSDWKRRSKSKESMPSWGISKEELFQVVSVEKHIQDVLQFSKLKAACGCDGQLEMQQIKQERHLKQMSTIHKSATTLSRDYKWNGFGRSLGLRSVLVNQHSILMGEGSYKCDTEFRQTLGGNNSQRTHPEKKSCKCNECGKSFHFQSELRRHQRCHTGEKPYECSDCGRAFGHISSLIKHQRTHTGEKPYECSECGRAFSQSSSLVLHYRFHTGEKPYKCNECGRAFGHTSSLIKHQRTHTGEKPYECRECGRTFSQSSSLIVHYRFHTGEKPYKCNKCGRAFSQSSSLTQHYRFHTGEKPYKCNECGRAFAHTASLIKHQRSHAGKKTL

SEQ ID NO: 16216 - protein, 1163 aa, Homo sapiens
MDRNREAEMELRRGPSPTRAGRGHEVDGDKATCHTCCICGKSFPFQSSLSQHMRKHTGEKPYKCPYCDHRASQKGNLKIHIRSHRTGTLIQGHEPEAGEAPLGEMRASEGLDACASPTKSASACNRLLNGASQADGARVLNGASQADSGRVLLRSSKKGAEGSACAPGEAKAAVQCSFCKSQFERKKDLELHVHQAHKPFKCRLCSYATLREESLLSHIERDHITAQGPGSGEACVENGKPELSPGEFPCEVCGQAFSQTWFLKAHMKKHRGSFDHGCHICGRRFKEPWFLKNHMKAHGPKTGSKNRPKSELDPIATINNVVQEEVIVAGLSLYEVCAKCGNLFTNLDSLNAHNAIHRRVEASRTRAPAEEGAEGPSDTKQFFLQCLNLRPSAAGDSCPGTQAGRRVAELDPVNSYQAWQLATRGKVAEPAEYLKYGAWDEALAGDVAFDKDRREYVLVSQEKRKREQDAPAAQGPPRKRASGPGDPAPAGHLDPRSAARPNRRAAATTGQGKSSECFECGKIFRTYHQMVLHSRVHRRARRERDSDGDRAARARCGSLSEGDSASQPSSPGSACAAADSPGSGLADEAAEDSGEEGAPEPAPGGQPRRCCFSEEVTSTELSSGDQSHKMGDNASERDTGESKAGIAASVSILENSSRETSRRQEQHRFSMDLKMPAFHPKQEVPVPGDGVEFPSSTGAEGQTGHPAEKLSDLHNKEHSGGGKRALAPDLMPLDLSARSTRDDPSNKETASSLQAALVVHPCPYCSHKTYYPEVLWMHKRIWHRVSCNSVAPPWIQPNGYKSIRSNLVFLSRSGRTGPPPALGGKECQPLLLARFTRTQVPGGMPGSKSGSSPLGVVTKAASMPKNKESHSGGPCALWAPGPDGYRQTKPCHGQEPHGAATQGPLAKPRQEASSKPVPAPGGGGFSRSATPTPTVIARAGAQPSANSKPVEKFGVPPAGAGFAPTNKHSAPDSLKAKFSAQPQGPPPAKGEGGAPPLPPREPPSKAAQELRTLATCAAGSRGDAALQAQPGVAGAPPVLHSIKQEPVAEGHEKRLDILNIFKTYIPKDFATLYQGWGVSGPGLEHRGTLRTQARPGEFVCIECGKSFHQPGHLRAHMRAHSVVFESDGPRGSEVHTTSADAPKQGRDHSNTGTVQTVPLRKGT

SEQ ID NO: 16217 - protein, 492 aa, Homo sapiens
MAMALPMPGPQEAVVFEDVAVYFTRIEWSCLAPDQQALYRDVMLENYGNLASLGFLVAKPALISLLEQGEEPGALILQVAEQSVAKASLCTDSRMEAGIMESPLQRKLSRQAGLPGTVWGCLPWGHPVGGHPAPPHPHGGPEDGSDKPTHPRAREHSASPRVLQEDLGRPVGSSAPRYRCVCGKAFRYNSLLLRHQIIHTGAKPFQCTECGKAFKQSSILLRHQLIHTEEKPFQCGECGKAFRQSTQLAAHHRVHTRERPYACGECGKAFSRSSRLLQHQKFHTGEKPFACTECGKAFCRRFTLNEHGRIHSGERPYRCLRCGQRFIRGSSLLKHHRLHAQEGAQDGGVGQGALLGAAQRPQAGDPPHECPVCGRPFRHNSLLLLHLRLHTGEKPFECAECGKAFGRKSNLTLHQKIHTKEKPFACTECGKAFRRSYTLNEHYRLHSGERPYRCRACGRACSRLSTLIQHQKVHGREPGEDTEGRRAPCWAS

SEQ ID NO: 16218 - protein, 1483 aa, Homo sapiens
MPSEQKQLFCDEKQTTLKKDYDVKNEIVDRSAPKPKISGSIHYALKNVKIDLPKINIPNEVLLKHEVDKYRKLFQSKQQTARKSISIKTVSCVEECTLLHKSERAEEEGVKMSAKILNFSCLKCRDNTRYSPNDLQKHFQMWHHGELPSYPCEMCNFSANDFQVFKQHRRTHRSTLVKCDICNNESVYTLLNLTKHFTSTHCVNGNFQCEKCKFSTQDVGTFVQHIHRHNEIHYKCGKCHHVCFTKGELQKHLHIHSGTFPFTCQYCSYGATRREHLVRHVITLHKEHLYAKEKLEKDKYEKRMAKTSAGLKLILKRYKIGASRKTFWKRKKINSGSDRSIEKNTQVLKKMNKTQTKSEDQSHVVQEHLSEEKDERLHCENNDKAPESESEKPTPLSTGQGNRAEEGPNASSGFMKTAVLGPTLKNVMMKNNKLAVSPNYNATFMGFKMMDGKQHIVLKLVPIKQNVCSPGSQSGAAKDGTANLQPQTLDTNGFLTGVTTELNDTVYMKAATPFSCSSSILSGKASSEKEMTLISQRNNMLQTMDYEKSVSSLSATSELVTASVNLTTKFETRDNVDFWGNHLTQSHPEVLGTTIKSPDKVNCVAKPNAYNSGDMHNYCINYGNCELPVESSNQGSLPFHNYSKVNNSNKRRRFSGTAVYENPQRESSSSKTVVQQPISESFLSLVRQESSKPDSLLASISLLNDKDGTLKAKSEIEEQYVLEKGQNIDGQNLYSNENQNLECATEKSKWEDFSNVDSPMMPRITSVFSLQSQQASEFLPPEVNQLLQDVLKIKPDVKQDSSNTPNKGLPLHCDQSFQKHEREGKIVESSKDFKVQGIFPVPPGSVGINVPTNDLNLKFGKEKQVSSIPQDVRDSEKMPRISGFGTLLKTQSDAIITQQLVKDKLRATTQNLGSFYMQSPLLNSEQKKTIIVQTSKGFLIPLNITNKPGLPVIPGNALPLVNSQGIPASLFVNKKPGMVLTLNNGKLEGVSAVKTEGAPARGTVTKEPCKTPILKVEPNNNCLTPGLCSSIGSCLSMKSSSENTLPLKGPYILKPTSSVKAVLIPNMLSEQQSTKLNISDSVKQQNEIFPKPPLYTFLPDGKQAVFLKCVMPNKTELLKPKLVQNSTYQNIQPKKPEGTPQRILLKIFNPVLNVTAANNLSVSNSASSLQKDNVPSNQIIGGEQKEPESRDALPFLLDDLMPANEIVITSTATCPESSEEPICVSDCSESRVLRCKTNCRIERNFNRKKTSKKIFSKTKTHGSKDSETAFVSRNRNCKRKCRDSYQEPPRRKATLHRKCKEKAKPEDVRETFGFSRPRLSKDSIRTLRLFPFSSKQLVKCPRRNQPVVVLNHPDADAPEVVSVMKTIAKFNGHVLKVSLSKRTINALLKPVCYNPPKTTYDDFSKRHKTFKPVSSVKERFVLKLTLKKTSKNNYQIVKTTSENILKAKFNCWFCGRVFDNQDTWAGHGQRHLMEATRDWNMLE

SEQ ID NO: 16219 - protein, 1074 aa, Homo sapiens
MKDIGQQLYTTHLNGGHNSLTMSPKQPDANGAPRPNRQEAQTLLYQGSEAEAAMMTIATCAKCKSVHKISLQDLQKGTGKDGMYVCFQCSLGAAPPNFHFVSNNSSATHVGNKTENFSSSVNSKFKVRNFKPGKYYCDKCRFSTKDPLQYKKHTLQHEEIKFICSHCSYISYTKGEFQRHLVKHTGIFPYQCEYCDYGAIRNDYIVKHTKRVHERAGAKRPVKAVAKLEPKRTGTSKQNPELLKASNPRTTFQNKWSDQLSGFSLHANKDKMHNIMLLPEPKEYQKDVVCIPNKMTLSEPNEVNLFENKNVEVEVLSPAKEPVQPGMPLTVVAPAELVVPANCLAQLIDVKVVNGTQQLVLKLFPLEENNCLEAGRDNGGNSERMVKEKGSNEQEKVLSAEKTKSLTVDGNVGKLVGIDSFQPSVQKQLKNVKWVRSYDFIMPNSSVHNNGKSFINSETIEDFQKKNNLYPHRTAFPSVALKGHSLASVFKNSVLRSLGAASNPFPYKAAVCFAESGRNLHSSSQQLLPFAASPATCSFSGEKGLLPVSENDLESTSKVNIPVKVVSSNRKQEDNQTEEHKAVSTVGQISSQHKSEYLHINITGEDRSQQPGDKPLELKNSERTNNTNDGPVISSVFSLSSGSENVPEGIKWNSSTSKIKSIELLRRKIAQLIESCGKPSSLASNSAHRRSVGQASKGTSKATSEGIQEINVSLTGLGHSTGTLQKPPNDGGITGNRQLTHQQIYPHFADGSNRKTKSRVARKAHVATPVLIPKGAVLRVLNSSENAHIIEATCEAPVSIPCSERQLIKPVPFCPVRQADSDLQPLRSERGPIDMSPNIETPLRPKLRKESAVCSTIHRKTGLLYGQQGSSELNKQGRLLSRSLSISRNKTKQVHLSRKKNKIQAEPSRCLKDPSIFQVARQLRLIAAKPDQLIKCPRRNQPVIVLNHPDVDSPEVTNVMKVINKYKGNVLKVVLSERTRCQLGIRRHHVRLTYQNAEEASQIKRQMMLKMKLKKVHKNNYQVVDSLPDDSSQCVFKCWFCGRLYEDQEEWMSHGQRHLIEATRDWDVLSSKGK

SEQ ID NO: 16220 - protein, 540 aa, Homo sapiens
MELLTFRDVAIEFSPEEWKCLDPAQQNLYRDVMLENYRNLVSLAVYSYYNQGILPEQGIQDSFKKATLGRYGSCGLENICLWKNWESIGEGEGQKECYNLCSQYLTTSHNKHLTVKGDKEYRIFQKKPQFLSAAPTEPCIPMNKYQHKFLKSVFCNKNQINFNHDSNISKHHSTHFLENYYNCNECEKVFYQSSKLIFPENIHIQKKPYNSNECGETSDPFSKLTQHQRIYIGESSQRCNKKCIIVFSQSHLKGHKIINTGEKSVKYKERGKAFTRGLHLGHQKIHTGEKPYKCKKCDKAFNKSSHLAQHQRIHTGEKPFKCKECGKAFNRGSYLTQHQRIHTGERAFKCEECGKAFNRGSYLTQHQRIHTGEKPFRCKECGKAFNRSSYVTQHQRMHTGEKPFKCKECGKAFNRASHLTQHQRIHTGEKHFKCKECGKAFNRGSHLTRHQRIHTGEKSFKCEECGKAFIWGSHLTQHQRVHTGEKFFKCKECGKAFTRSSHLTQHQRIHTGEKPFKCKECGKAFNRRSTLTQHQIIHTR

SEQ ID NO: 16221 - protein, 1311 aa, Homo sapiens
MSRRKQAKPRSLKDPNCKLEDKTEDGEALDCKKRPEDGEELEDEAVHSCDSCLQVFESLSDITEHKINQCQLTDGVDVEDDPTCSWPASSPSSKDQTSPSHGEGCDFGEEEGGPGLPYPCQFCDKSFSRLSYLKHHEQSHSDKLPFKCTYCSRLFKHKRSRDRHIKLHTGDKKYHCSECDAAFSRSDHLKIHLKTHTSNKPYKCAICRRGFLSSSSLHGHMQVHERNKDGSQSGSRMEDWKMKDTQKCSQCEEGFDFPEDLQKHIAECHPECSPNEDRAALQCVYCHELFVEETSLMNHMEQVHSGEKKNSCSICSESFHTVEELYSHMDSHQQPESCNHSNSPSLVTVGYTSVSSTTPDSNLSVDSSTMVEAAPPIPKSRGRKRAAQQTPDMTGPSSKQAKVTYSCIYCNKQLFSSLAVLQIHLKTMHLDKPEQAHICQYCLEVLPSLYNLNEHLKQVHEAQDPGLIVSAMPAIVYQCNFCSEVVNDLNTLQEHIRCSHGFANPAAKDSNAFFCPHCYMGFLTDSSLEEHIRQVHCDLSGSRFGSPVLGTPKEPVVEVYSCSYCTNSPIFNSVLKLNKHIKENHKNIPLALNYIHNGKKSRALSPLSPVAIEQTSLKMMQAVGGAPARPTGEYICNQCGAKYTSLDSFQTHLKTHLDTVLPKLTCPQCNKEFPNQESLLKHVTIHFMITSTYYICESCDKQFTSVDDLQKHLLDMHTFVFFRCTLCQEVFDSKVSIQLHLAVKHSNEKKVYRCTSCNWDFRNETDLQLHVKHNHLENQGKVHKCIFCGESFGTEVELQCHITTHSKKYNCKFCSKAFHAIILLEKHLREKHCVFETKTPNCGTNGASEQVQKEEVELQTLLTNSQESHNSHDGSEEDVDTSEPMYGCDICGAAYTMETLLQNHQLRDHNIRPGESAIVKKKAELIKGNYKCNVCSRTFFSENGLREHMQTHLGPVKHYMCPICGERFPSLLTLTEHKVTHSKSLDTGNCRICKMPLQSEEEFLEHCQMHPDLRNSLTGFRCVVCMQTVTSTLELKIHGTFHMQKTGNGSAVQTTGRGQHVQKLYKCASCLKEFRSKQDLVKLDINGLPYGLCAGCVNLSKSASPGINVPPGTNRPGLGQNENLSAIEGKGKVGGLKTRCSSCNVKFESESELQNHIQTIHRELVPDSNSTQLKTPQVSPMPRISPSQSDEKKTYQCIKCQMVFYNEWDIQVHVANHMIDEGLNHECKLCSQTFDSPAKLQCHLIEHSFEGMGGTFKCPVCFTVFVQANKLQQHIFSAHGQEDKIYDCTQCPQKFFFQTELQNHTMTQHSS

SEQ ID NO: 16222 - protein, 264 aa, Homo sapiens
MDTPSPDPLPSPLPGEEEKPLALSPPVPRGRRGRRPGGATSSNRTLKASLPRKRGRPPKSGQEPPLVQVQGVTAPVGSSGGSDLLLIDDQGVPYTVSEGSAAGPEGSGPRKAPHFCPVCLRAFPYLSDLERHSISHSELKPHQCKVCGKTFKRSSHLRRHCNIHAGLRPFRCPLCPRRFREAGELAHHHRVHSGERPYQCPICRLRFTEANTLRRHAKRKHPEAMGVPLCAPDPGSEPPWDEEGIPATAGAEEEEETEGKGEPA

SEQ ID NO: 16223 - protein, 670 aa, Homo sapiens
MAEVVAEVAEMPTQMSPGAVEMSTPMSAEMMEMSTEVTEMTPGEALASSLFFQHHQFMCSECGSLYNTLEEVLSHQEQHMLAVSEEEALTTQNVGLEPELVPGAEGPFQCGECSQLILSPGELLAHQDAHLRESANQIQYQCWDCQELFPSPELWVAHRKAQHLSATVAEPPVPPPLPPPTPLPPPSPPSEVKMEPYECPECSTLCATPEEFLEHQGTHFDSLEKEERNGLEEEEEDDEEDEEDDEEMEDEEAMAEVGDDAVGGDESTAGWAQGCGDCPQHQPSAGARRQHRRTAHSPASATHPFHCSQCQRSFSSANRLQAHGRAHVGGTHECTTCSKVFKKAASLEQHLRLHRGEARYLCVDCGRGFGTELTLVAHRRAHTANPLHRCRCGKTFSNMTKFLYHRRTHAGKSGAPPTGATAPPAPAEPTPPPPPPAPPAQLPCPQCSKSFASASRLSRHRRAVHGPPERRHRCGVCGKGFKKLIHVRNHLRTHTGERPFQCHSCGKTFASLANLSRHQLTHTGARPYQCLDCGKRFTQSSNLQQHRRLHLRPVAFARAPRLPITGLYNKSPYYCGTCGRWFRAMAGLRLHQRVHARARTLTLQPPRSPSPAPPPPPEPQQTIMCTELGETIAIIETSQPLALEDTLQLCQAALGASEAGGLLQLDTAFV

SEQ ID NO: 16224 - protein, 609 aa, Homo sapiens
MAVGLCKAMSQGLVTFRDVALDFSQEEWEWLKPSQKDLYRDVMLENYRNLVWLGLSISKPNMISLLEQGKEPWMVERKMSQGHCADWESWCEIEELSPKWFIDEDEISQEMVMERLASHGLECSSFREAWKYKGEFELHQGNAERHFMQVTAVKEISTGKRDNEFSNSGRSIPLKSVFLTQQKVPTIQQVHKFDIYDKLFPQNSVIIEYKRLHAEKESLIGNECEEFNQSTYLSKDIGIPPGEKPYESHDFSKLLSFHSLFTQHQTTHFGKLPHGYDECGDAFSCYSFFTQPQRIHSGEKPYACNDCGKAFSHDFFLSEHQRTHIGEKPYECKECNKAFRQSAHLAQHQRIHTGEKPFACNECGKAFSRYAFLVEHQRIHTGEKPYECKECNKAFRQSAHLNQHQRIHTGEKPYECNQCGKAFSRRIALTLHQRIHTGEKPFKCSECGKTFGYRSHLNQHQRIHTGEKPYECIKCGKFFRTDSQLNRHHRIHTGERPFECSKCGKAFSDALVLIHHKRSHAGEKPYECNKCGKAFSCGSYLNQHQRIHTGEKPYECSECGKAFHQILSLRLHQRIHAGEKPYKCNECGNNFSCVSALRRHQRIHNRETL

SEQ ID NO: 16225 - protein, 628 aa, Homo sapiens
MALTQGPLKFMDVAIEFSQEEWKCLDPAQRTLYRDVMLENYRNLVSLGICLPDLSVTSMLEQKRDPWTLQSEEKIANDPDGRECIKGVNTERSSKLGSNAGNKPCKNQLGFTFQLHLSDLQLFQAERKISGCKHFEKPVSDNSSVSPLEKISSSVKSHLLNKYRNNFDHAPLLPQEQKAHIREKAYKCNEHGQVFRASASLTNQVIHNADNPYKCSECGKVFSCSSKLVIHRRMHTGEKPYKCHECGKLFSSNSNLSQHQRIHTGEKPYKCHECDKVFRSSSKLAQHQRIHTGEKPYKCHECDKVFNQIAHLVRHQKIHTGEKPYSCNKCGKVFSRHSYLAEHQTVHTGEKPYKCEECGKAFSVRSSLITHQLIHTGRKPYKCKECDKVFGRKCFLTSHQRIHTRERPYGCSQCGKIFSQKSDLIRHRKTHTDEKPYKCNKCGTAFREFSDLTAHFLIHSGEKPYECKECGKVFRYKSSLTSHHRIHTGEKPYKCNRCGKVFSRSSNLVCHQKIHTGEKPYKCNQCGKVFNQASYLTRHQIIHTGERPYRCSKCGKAFRGCSGLTAHLAIHTEKKSHECKECGKIFTQKSSLTNHHRIHIGEKPYKCTLCSKVFSHNSDLAQHQRVHS

SEQ ID NO: 16226 - protein, 563 aa, Homo sapiens
MANSSFIGDHVHGAPHAVMPEVEFPDQFFTVLTMDHELVTLRDVVINFSQEEWEYLDSAQRNLYWDVMMENYSNLLSLDLESRNETKHLSVGKDIIQNTGSQWEVMESSKLCGLEGSIFRNDWQSKSKIDLQGPEVGYFSQMKIISENVPSYKTHESLTLPRRTHDSEKPYEYKEYEKVFSCDLEFDEYQKIHTGGKNYECNQCWKTFGIDNSSMLQLNIHTGVKPCKYMEYGNTCSFYKDFNVYQKIHNEKFYKCKEYRRTFERVGKVTPLQRVHDGEKHFECSFCGKSFRVHAQLTRHQKIHTDEKTYKCMECGKDFRFHSQLTEHQRIHTGEKPYKCMHCEKVFRISSQLIEHQRIHTGEKPYACKECGKAFGVCRELARHQRIHTGKKPYECKACGKVFRNSSSLTRHQRIHTGEKPYKCKECEKAFGVGSELTRHERIHSGQKPYECKECGKFFRLTSALIQHQRIHSGEKPYECKVCGKAFRHSSALTEHQRIHTGEKPYECKACGKAFRHSSSFTKHQRIHTDDKPYECKECGNSFSVVGHLTCQPKIYTGEKSFD

SEQ ID NO: 16227 - protein, 599 aa, Homo sapiens
MAAALRAPTQQVFVAFEDVAIYFSQEEWELLDEMQRLLYRDVMLENFAVMASLGCWCGAVDEGTPSAESVSVEELSQGRTPKADTSTDKSHPCEICTPVLRDILQMIELHASPCGQKLYLGGASRDFWMSSNLHQLQKLDNGEKLFKVDGDQASFMMNCRFHVSGKPFTFGEVGRDFSATSGLLQHQVTPTIERPHSRIRHLRVPTGRKPLKYTESRKSFREKSVFIQHQRADSGERPYKCSECGKSFSQSSGFLRHRKAHGRTRTHECSECGKSFSRKTHLTQHQRVHTGERPYDCSECGKSFRQVSVLIQHQRVHTGERPYECSECGKSFSHSTNLYRHRSAHTSTRPYECSECGKSFSHSTNLFRHWRVHTGVRPYECSECGKAFSCNIYLIHHQRFHTGERPYVCSECGKSFGQKSVLIQHQRVHTGERPYECSECGKVFSQSSGLFRHRRAHTKTKPYECSECEKSFSCKTDLIRHQTVHTGERPYECSVCGKSFIRKTHLIRHQTVHTNERPYECDECGKSYSQSSALLQHRRVHTGERPYECRECGKSFTRKNHLIQHKTVHTGERPYECSECGKSFSQSSGLLRHRRVHVQ

SEQ ID NO: 16228 - protein, 1301 aa, Homo sapiens
MTMGDMKTPDFDDLLAAFDIPDMVDPKAAIESGHDDHESHMKQNAHGEDDSHAPSSSDVGVSVIVKNVRNIDSSEGGEKDGHNPTGNGLHNGFLTASSLDSYSKDGAKSLKGDVPASEVTLKDSTFSQFSPISSAEEFDDDEKIEVDDPPDKEDMRSSFRSNVLTGSAPQQDYDKLKALGGENSSKTGLSTSGNVEKNKAVKRETEASSINLSVYEPFKVRKAEDKLKESSDKVLENRVLDGKLSSEKNDTSLPSVAPSKTKSSSKLSSCIAAIAALSAKKAASDSCKEPVANSRESSPLPKEVNDSPRAADKSPESQNLIDGTKKPSLKQPDSPRSISSENSSKGSPSSPAGSTPAIPKVRIKTIKTSSGEIKRTVTRVLPEVDLDSGKKPSEQTASVMASVTSLLSSPASAAVLSSPPRAPLQSAVVTNAVSPAELTPKQVTIKPVATAFLPVSAVKTAGSQVINLKLANNTTVKATVISAASVQSASSAIIKAANAIQQQTVVVPASSLANAKLVPKTVHLANLNLLPQGAQATSELRQVLTKPQQQIKQAIINAAASQPPKKVSRVQVVSSLQSSVVEAFNKVLSSVNPVPVYIPNLSPPANAGITLPTRGYKCLECGDSFALEKSLTQHYDRRSVRIEVTCNHCTKNLVFYNKCSLLSHARGHKEKGVVMQCSHLILKPVPADQMIVSPSSNTSTSTSTLQSPVGAGTHTVTKIQSGITGTVISAPSSTPITPAMPLDEDPSKLCRHSLKCLECNEVFQDETSLATHFQQAADTSGQKTCTICQMLLPNQCSYASHQRIHQHKSPYTCPECGAICRSVHFQTHVTKNCLHYTRRVGFRCVHCNVVYSDVAALKSHIQGSHCEVFYKCPICPMAFKSAPSTHSHAYTQHPGIKIGEPKIIYKCSMCDTVFTLQTLLYRHFDQHIENQKVSVFKCPDCSLLYAQKQLMMDHIKSMHGTLKSIEGPPNLGINLPLSIKPATQNSANQNKEDTKSMNGKEKLEKKSPSPVKKSMETKKVASPGWTCWECDCLFMQRDVYISHVRKEHGKQMKKHPCRQCDKSFSSSHSLCRHNRIKHKGIRKVYACSHCPDSRRTFTKRLMLEKHVQLMHGIKDPDLKEMTDATNEEETEIKEDTKVPSPKRKLEEPVLEFRPPRGAITQPLKKLKINVFKVHKCAVCGFTTENLLQFHEHIPQHKSDGSSYQCRECGLCYTSHVSLSRHLFIVHKLKEPQPVSKQNGAGEDNQQENKPSHEDESPDGAVSDRKCKVCAKTFETEAALNTHMRTHGMAFIKSKRMSSAEK

SEQ ID NO: 16229 - protein, 674 aa, Homo sapiens
MALTQGQLSFSDVAIEFSQEEWKCLDPGQKALYRDVMLENYRNLVSLGEDNVRPEACICSGICLPDLSVTSMLEQKRDPWTLQSEVKIINNPDGRECIKGVNTEKSSKLGSSAGNKSLKNQHGLTLQLHLTEWQPFQAVRNIYGCKHVEKSISDNSSVSPVQISFFSVKTHIFNNYRNDFLFSTLLPQEQKVHIREKPYGCNEHGKVFRVSSSLTNRQVIHIADKTYKCSDCGEIFSSNSNFAQHQRIHTGEKPYKYNECGKVFNQNSHLAQHQKIHTGQKPYNNKECGKVFSHHAYLAQHRKIHTGEKPYKCSECGKAFSVCSSLTAHLVIHTGEKPYDCKECGKVFRHKSSLTTHQTVHTGERPYKCNECGKGFSRIAFLARHRKVHTGEKPYKCNECGKVFIGNSRLARHRKIHTGGRRYKCNECGKAFRTCSDLTAHLLIHTGEKPYECIDCGKVFRHKSSLTYHCRIHTGEKPYKCNECGKVFSQNSNLQRHRKIHTGEKLYKCNECGKVFRQNSHLAQHRDIHTGEKPYSCNECGKVFRRNSHLVRHRNVHTGEKPYSCNECGKVFSRNSHLARHRNIHTGEKPHSCNECGKVFSRNSHLARHRKIHTGEKLYKCNECSKVFSRNSRLAQHRNIHTGVKPYSCNECGKVFSKNSILVQHCSIHTREKP

SEQ ID NO: 16230 - protein, 1300 aa, Homo sapiens
MEEASLCLGVSSAEPEAEPHLSGPVLNGQYAMSQKLHQITSQLSHAFPELHPRPNPEEKPPASLEEKAHVPMSGQPMGSQMALLANQLGREVDTSLNGRVDLQQFLNGQNLGIMSQMSDIEDDARKNRKYPCPLCGKRFRFNSILSLHMRTHTGEKPFKCPYCDHRAAQKGNLKIHLRTHKLGNLGKGRGRVREENRLLHELEERAILRDKQLKGSLLQPRPDLKPPPHAQQAPLAACTLALQANHSVPDVAHPVPSPKPASVQEDAVAPAAGFRCTFCKGKFKKREELDRHIRILHKPYKCTLCDFAASQEEELISHVEKAHITAESAQGQGPNGGGEQSANEFRCEVCGQVFSQAWFLKGHMRKHKDSFEHCCQICGRRFKEPWFLKNHMKVHLNKLSVKNKSPSDPEVPVPMGGMSQEAHANLYSRYLSCLQSGFMTPDKAGLSEPSQLYGKGELPMKEKEALGKLLSPISSMAHGVPEGDKHSLLGCLNLVPPLKSSCIERLQAAAKAAEMDPVNSYQAWQLMARGMAMEHGFLSKEHPLQRNHEDTLANAGVLFDKEKREYVLVGADGSKQKMPADLVHSTKVGSQRDLPSKLDPLESSRDFLSHGLNQTLEYNLQGPGNMKEKPTECPDCGRVFRTYHQVVVHSRVHKRDRKGEEDGLHVGLDERRGSGSDQESQSVSRSTTPGSSNVTEESGVGGGLSQTGSAQEDSPHPSSPSSSDIGEEAGRSAGVQQPALLRDRSLGSAMKDCPYCGKTFRTSHHLKVHLRIHTGEKPYKCPHCDYAGTQSASLKYHLERHHRERQNGAGPLSGQPPNQDHKDEMSSKASLFIRPDILRGAFKGLPGIDFRGGPASQQWTSGVLSSGDHSGQATGMSSEVPSDALKGTDLPSKSTHFSEIGRAYQSIVSNGVNFQGSLQAFMDSFVLSSLKKEKDMKDKALADPPSMKVHGVDGGEEKPSGKSSQRKSEKSQYEPLDLSVRPDAASLPGSSVTVQDSIAWHGCLFCAFTTSSMELMALHLQANHLGKAKRKDNTIGVTVNCKDQAREASKMALLPSLQSNKDLGLSNMISSLDSASEKMAQGQLKETLGEQKSGAWTGHVDPAFCNFPSDFYKQFGVYPGMVGSGASSSCPNKEPDGKAHSEEDVPILIPETTSKNTTDDLSDIASSEDMDSSKGENNDEEDVETEPEMMTKPLSALSKDSSSDGGDSLQPTGTSQPVQGLVSPLSQAPEKQWHSQGLLQAQDPLAGLPKPERGPQSLDKPMNMLSVLRAYSSDGLAAFNGLASSTANSGCIKRPDLCGK

SEQ ID NO: 16231 - protein, 660 aa, Homo sapiens
MAHALVTFRDVAIDFSQKEWECLDTTQRKLYRDVMLENYNNLVSLGYSGSKPDVITLLEQGKEPCVVARDVTGRQCPGLLSRHKTKKLSSEKDIHEISLSKESIIEKSKTLRLKGSIFRNEWQNKSEFEGQQGLKERSISQKKIVSKKMSTDRKRPSFTLNQRIHNSEKSCDSHLVQHGKIDSDVKHDCKECGSTFNNVYQLTLHQKIHTGEKSCKCEKCGKVFSHSYQLTLHQRFHTGEKPYECQECGKTFTLYPQLNRHQKIHTGKKPYMCKKCDKGFFSRLELTQHKRIHTGKKSYECKECGKVFQLIFYFKEHERIHTGKKPYECKECGKAFSVCGQLTRHQKIHTGVKPYECKECGKTFRLSFYLTEHRRTHAGKKPYECKECGKSFNVRGQLNRHKTIHTGIKPFACKVCEKAFSYSGDLRVHSRIHTGEKPYECKECGKAFMLRSVLTEHQRLHTGVKPYECKECGKTFRVRSQISLHKKIHTDVKPYKCVRCGKTFRFGFYLTEHQRIHTGEKPYKCKECGKAFIRRGNLKEHLKIHSGLKPYDCKECGKSFSRRGQFTEHQKIHTGVKPYKCKECGKAFSRSVDLRIHQRIHTGEKPYECKQCGKAFRLNSHLTEHQRIHTGEKPYECKVCRKAFRQYSHLYQHQKTHNVI

SEQ ID NO: 16232 - protein, 1346 aa, Homo sapiens
MDQYSLGDEGALPSEMHLPSFSESQGLNCSDTLNRDLGPNTRGFLYAGLSGLDPDPSLPTPDMSSEVLEDNLDTLSLYSGKDSDSVKLLEEYADSESQASLQDLGLGVLKAKEADEGGRATSGSARKGKRQHSSPQNPLLDCSLCGKVFSSASSLSKHYLTHSQERKHVCKICSKAFKRQDHLTGHMLTHQKTKPFVCIEQGCSKSYCDYRSLRRHYEVHHGLCILKEAPPEEEACGDSPHAHESAGQPPPSSLRSLVPPEARSPGSLLPHRDLLRRIVSSIVHQKTPSPGPAPAGASDSEGRNTACPCPASSGSSSCTPAGPHAAPAALDTELPEEPCLPQKEPATDVFTAPNSRAAENGAPDPPEPEPDTALLQARSTAECWPEGGSVPACLPLFRGQTVPASSQPSSHSFQWLRNLPGCPKSKGNNVFVVHKPSAVPSREGSESGPGPSSGSPSEESPPGPGGGLEDALPFPAALLRVPAEAPSDPRSASGEDDPCAPKKVKVDCDSFLCQNPGEPGLQEAQKAGGLPADASPLFRQLFLKSQEPLVSHEQMQVFQMITKSQRIFSHAQVAAVSSQLPAPEGKPAALRPLQGPWPQQPPPLAPAVDSLHAGPGNPEAEGSPARRRKTTPGVPREASPGSTRRDAKGGLKVAAVPTPLAAPSLDPSRNPDISSLAKQLRSSKGTLDLEDIFPSTGQRQTQLGGEEPPGASLPGKQAPAENGAASRITKGEKGPACSRGGGYRLLGNPRAPRFSGFRKEKAKMDMCCAASPSQVAMASFSSAGPPADPSKSKLTIFSRIQGGNIYRLPHPVKEENVAGRGNQQNGSPTDWTKPRSTFVCKNCSQMFYTEKGLSSHMCFHSDQWPSPRGKQEPQVFGTEFCKPLRQVLRPEGDRHSPPGTKKPLDPTAAAPLVVPQSIPVVPVTRHIGSMAMGQEKDGEERDSKESSQQRKRKKRPPPSTAGEPGPAGCHQSRLRSPMFLVDCLLKGLFQCSPYTPPPMLSPIREGSGVYFNTLCSTSTQASPDQLISSMLDQVDGSFGICVVKDDTKISIEPHINIGSRFQAEIPELQERSLAGTDEHVASLVWKPWGDMMISSETQDRVTELCNVACSSVMPGGGTNLELALHCLHEAQGNVQVALETLLLRGPHKPRTHLLADYRYTGSDVWTPIEKRLFKKAFYAHKKDFYLIHKMIQTKTVAQCVEYYYIWKKMIKFDCGRAPGLEKRVKREPEEVERTEEKVPCSPRERPSHHPTPKLKTKSYRRESILSSSPNAGSKRTPELLGSAESQGIFPCRECERVFDKIKSRNAHMKRHRLQDHVEPIIRVKWPVKPFQLKEEELGADIGPLQW

SEQ ID NO: 16233 - protein, 170 aa, Homo sapiens
MLENYQNLVWLGLSISKSVISLLEKRKLPWIMAKEEIRGPLPGYFKVSEMTISQEPKAKTRTLFGKDVPGAEIKELSAKRAINEVLSQFDTVIKCTRNVCKECGNLYCHNMQLTLHKRNHTQKKCNQCLDCGKYFTRQSTLIQHQRIHTGERPYKCNECIKTFNQRAHLT

SEQ ID NO: 16234 - protein, 600 aa, Homo sapiens
MAASAQVSVTFEDVAVTFTQEEWGQLDAAQRTLYQEVMLETCGLLMSLGCPLFKPELIYQLDHRQELWMATKDLSQSSYPGDNTKPKTTEPTFSHLALPEEVLLQEQLTQGASKNSQLGQSKDQDGPSEMQEVHLKIGIGPQRGKLLEKMSSERDGLGSDDGVCTKITQKQVSTEGDLYECDSHGPVTDALIREEKNSYKCEECGKVFKKNALLVQHERIHTQVKPYECTECGKTFSKSTHLLQHLIIHTGEKPYKCMECGKAFNRRSHLTRHQRIHSGEKPYKCSECGKAFTHRSTFVLHHRSHTGEKPFVCKECGKAFRDRPGFIRHYIIHTGEKPYECIECGKAFNRRSYLTWHQQIHTGVKPFECNECGKAFCESADLIQHYIIHTGEKPYKCMECGKAFNRRSHLKQHQRIHTGEKPYECSECGKAFTHCSTFVLHKRTHTGEKPYECKECGKAFSDRADLIRHFSIHTGEKPYECVECGKAFNRSSHLTRHQQIHTGEKPYECIQCGKAFCRSANLIRHSIIHTGEKPYECSECGKAFNRGSSLTHHQRIHTGRNPTIVTDVGRPFMTAQTSVNIQELLLGKEFLNITTEENLW

SEQ ID NO: 16235 - protein, 715 aa, Homo sapiens
MEARSMLVPPQASVCFEDVAMAFTQEEWEQLDLAQRTLYREVTLETWEHIVSLGLFLSKSDVISQLEQEEDLCRAEQEAPRDWKATLEENRLNSEKDRAREELSHHVEVYRSGPEEPPSLVLGKVQDQSNQLREHQENSLRFMVLTSERLFAQREHCELELGGGYSLPSTLSLLPTTLPTSTGFPKPNSQVKELKQNSAFINHEKNGADGKHCESHQCARAFCQSIYLSKLGNVETGKKNPYEYIVSGDSLNYGSSLCFHGRTFSVKKSDDCKDYGNLFSHSVSLNEQKPVHFGKSQYECDECRETCSESLCLVQTERSGPGETPFRCEERCAAFPMASSFSDCNIIQTTEKPSVCNQCGKSFSCCKLIHQRTHTGEKPFECTQCGKSFSQSYDLVIHQRTHTGEKPYECDLCGKSFTQRSKLITHQRIHTGEKPYQCIECRKSFRWNSNLIVHQRIHTGEKPYECTHCGKSFSQSYELVTHKRTHTGEKPFKCTQCGKSFSQKYDLVVHQRTHTGEKPYECNLCGKSFSQSSKLITHQRIHTGEKPYQCIECGKSFRWNSNLVIHQRIHTGEKPYDCTHCGKSFSQSYQLVAHKRTHTGEKPYECNECGKAFNRSTQLIRHLQIHTGEKPYKCNQCNKAFARSSYLVMHQRTHTGEKPFECSQCGKAFSGSSNLLSHHRIHSGEKPYECSDCGKSFRQQSQLVVHRRTHTGEKP

SEQ ID NO: 16236 - protein, 836 aa, Homo sapiens
MQVDPPLHGPPNDFLIFQIIPLHSLSIMPRFLWILCFSMEETQGELTSSCGSKTMANVSLAFRDVSIDLSQEEWECLDAVQRDLYKDVMLENYSNLVSLGYTIPKPDVITLLEQEKEPWIVMREGTRNWFTDLEYKYITKNLLSEKNVCKIYLSQLQTGEKSKNTIHEDTIFRNGLQCKHEFERQERHQMGCVSQMLIQKQISHPLHPKIHAREKSYECKECRKAFRQQSYLIQHLRIHTGERPYKCMECGKAFCRVGDLRVHHTIHAGERPYECKECGKAFRLHYHLTEHQRIHSGVKPYECKECGKAFSRVRDLRVHQTIHAGERPYECKECGKAFRLHYQLTEHQRIHTGERPYECKVCGKTFRVQRHISQHQKIHTGVKPYKCNECGKAFSHGSYLVQHQKIHTGEKPYECKECGKSFSFHAELARHRRIHTGEKPYECRECGKAFRLQTELTRHHRTHTGEKPYECKECGKAFICGYQLTLHLRTHTGEIPYECKECGKTFSSRYHLTQHYRIHTGEKPYICNECGKAFRLQGELTRHHRIHTCEKPYECKECGKAFIHSNQFISHQRIHTSESTYICKECGKIFSRRYNLTQHFKIHTGEKPYICNECGKAFRFQTELTQHHRIHTGEKPYKCTECGKAFIRSTHLTQHHRIHTGEKPYECTECGKTFSRHYHLTQHHRGHTGEKPYICNECGNAFICSYRLTLHQRIHTGELPYECKECGKTFSRRYHLTQHFRLHTGEKPYSCKECGNAFRLQAELTRHHIVHTGEKPYKCKECGKAFSVNSELTRHHRIHTGEKPYQCKECGKAFIRSDQLTLHQRNHISEEVLCIM

SEQ ID NO: 16237 - protein, 402 aa, Homo sapiens
MAEMNPAQGHVVFEDVAIYFSQEEWGHLDEAQRLLYRDVMLENLALLSSLGCCHGAEDEEAPLEPGVSVGVSQVMAPKPCLSTQNTQPCETCSSLLKDILRLAEHDGTHPEQGLYTCPAHLHQHQKEQIREKLSRGDGGRPTFVKNHRVHMAGKTFLCSECGKAFSHKHKLSDHQKIHTGERTYKCSKCGILFMERSTLNRHQRTHTGERPYECNECGKAFLCKSHLVRHQTIHSGERPYECSECGKLFMWSSTLITHQRVHTGKRPYGCSECGKFFKCNSNLFRHYRIHTGKRSYGCSECGKFFMERSTLSRHQRVHTGERPYECNECGKFFSLKSVLIQHQRVHTGERPYECSECGKAFLTKSHLICHQTVHTAAKQCSECGKFFRYNSTLLRHQKVHTG

SEQ ID NO: 16238 - protein, 533 aa, Homo sapiens
MNLTEGRVVFEDVAIYFSQEEWGHLDEAQRLLYRDVMLENLALLSSLGSWHGAEDEEAPSQQGFSVGVSEVTASKPCLSSQKVHPSETCGPPLKDILCLVEHNGIHPEQHIYICEAELFQHPKQQIGENLSRGDDWIPSFGKNHRVHMAEEIFTCMEGWKDLPATSCLLQHQGPQSEWKPYRDTEDREAFQTGQNDYKCSECGKTFTCSYSFVEHQKIHTGERSYECNKCGKFFKYSANFMKHQTVHTSERTYECRECGKSFMYNYRLMRHKRVHTGERPYECNTCGKFFRYSSTFVRHQRVHTGERPYECRECGKFFMDSSTLIKHQRVHTGERPYKCNDCGKFFRYISTLIRHQRIHTGERPYECSVCGELFRYNSSLVKHWRNHTGERPYKCSECGKSFRYHCRLIRHQRVHTGERPYECSECGKFFRYNSNLIKHWRNHTGERPYECRECGKAFSHKHILVEHQKIHSGERPYECSECQKAFIRKSHLVHHQKIHSEERLVCSMNVGNSLAKTPTSLNIRDFTMEKVYH

SEQ ID NO: 16239 - protein, 640 aa, Homo sapiens
MAEAALVITPQIPMVTEEFVKPSQGHVTFEDIAVYFSQEEWGLLDEAQRCLYHDVMLENFSLMASVGCLHGIEAEEAPSEQTLSAQGVSQARTPKLGPSIPNAHSCEMCILVMKDILYLSEHQGTLPWQKPYTSVASGKWFSFGSNLQQHQNQDSGEKHIRKEESSALLLNSCKIPLSDNLFPCKDVEKDFPTILGLLQHQTTHSRQEYAHRSRETFQQRRYKCEQVFNEKVHVTEHQRVHTGEKAYKRREYGKSLNSKYLFVEHQRTHNAEKPYVCNICGKSFLHKQTLVGHQQRIHTRERSYVCIECGKSLSSKYSLVEHQRTHNGEKPYVCNVCGKSFRHKQTFVGHQQRIHTGERPYVCMECGKSFIHSYDRIRHQRVHTGEGAYQCSECGKSFIYKQSLLDHHRIHTGERPYECKECGKAFIHKKRLLEHQRIHTGEKPYVCIICGKSFIRSSDYMRHQRIHTGERAYECSDCGKAFISKQTLLKHHKIHTRERPYECSECGKGFYLEVKLLQHQRIHTREQLCECNECGKVFSHQKRLLEHQKVHTGEKPCECSECGKCFRHRTSLIQHQKVHSGERPYNCTACEKAFIYKNKLVEHQRIHTGEKPYECGKCGKAFNKRYSLVRHQKVHITEEP

SEQ ID NO: 16240 - protein, 422 aa, Homo sapiens
MAETKDAAQMLVTFKDVAVTFTREEWRQLDLAQRTLYREVMLETCGLLVSLGHRVPKPELVHLLEHGQELWIVKRGLSHATCAGDRAQVHTREPTTYPPVLSERAFLRGSLTLESSTSSDSRLGRARDEEGLLEMQKGKVTPETDLHKETHLGKVSLEGEGLGTDDGLHSRALQEWLSADVLHECDSQQPGKDALIHAGTNPYKCKQCGKGFNRKWYLVRHQRVHTGMKPYECNACGKAFSQSSTLIRHYLIHTGEKPYKCLECGKAFKRRSYLMQHHPIHTGEKPYECSQCRKAFTHRSTFIRHNRTHTGEKPFECKECEKAFSNRAHLIQHYIIHTGEKPYDCMACGKAFRCSSELIQHQRIHTGEKPYECTQCGKAFHRSTYLIQHSVIHTGEMPYKCIECGKAFKRRSHLLQHQRVHT

SEQ ID NO: 16241 - protein, 407 aa, Homo sapiens
MAAAALRFPVQGTVTFEDVAVKFTQEEWNLLSEAQRCLYRDVTLENLALMSSLGCWCGVEDEAAPSKQSIYIQRETQVRTPMAGVSPKKAHPCEMCGPILGDILHVADHQGTHHKQKLHRCEAWGNKLYDSGNFHQHQNEHIGEKPYRGSVEEALFAKRCKLHVSGESSVFSESGKDFLLRSGLLQQEATHTGKSNSKTECVSLFHGGKSHYSCGGCMKHFSTKDILSQHERLLPTEEPSVWCECGKSSSKYDSFSNHQGVHTREKPYTCGICGKLFNSKSHLLVHQRIHTGEKPYECEVCQKFFRHKYHLIAHQRVHTGERPYECSDCGKSFTHSSTFRVHKRVHTGQKPYECSECGKSFAESSSLTKHRRVHTGEKPYGCSECEKKFRQISSLRHHQRVHKRKGL

SEQ ID NO: 16242 - protein, 538 aa, Homo sapiens
MVTCAHLGRRARLPAAQPSACPGTCFSQEERMAAGYLPRWSQELVTFEDVSMDFSQEEWELLEPAQKNLYREVMLENYRNVVSLEALKNQCTDVGIKEGPLSPAQTSQVTSLSSWTGYLLFQPVASSHLEQREALWIEEKGTPQASCSDWMTVLRNQDSTYKKVALQEEPASGINMIKLIREDGGWKQLEDSHEDPQGLLSQKASLHVVAVPQEKATAWHGFGENGNLSPALVLSQGSSKGNHLCGSELDITSLASDSVLNHHQLGYADRRPCESNECGNAIRQNSHFIQHGGKMFVYLENGQSLNHGMALTIHNKINTAEKPFECHQCGKVFNRRHSLSEHQRIHTGEKPYECQECGRAFTHSSTLTRHLRTHTGEKPYGCGECGKAFNRISSLTQHQRIHTGEKPYKCEDCGKSFCQSSYLILHKRTHTGEKPYECSECGKAFSDRSSLNQHERTHTGENPYECKQCGRAFSQRSSLVRHERTHTGEKPYRCQECGKAFSQSSSLVTHQKTHSSQKTYKIIDCGKAFYQNRHLIGY

SEQ ID NO: 16243 - protein, 628 aa, Homo sapiens
MDSVVFEDVAVDFTLEEWALLDSAQRDLYRDVMLETFQNLASVDDETQFKASGSVSQQDIYGEKIPKESKIATFTRNVSWASVLGKIWDSLSIEDQTTNQGRNLSRNHGLERLCESNDQCGEALSQIPHLNLYKKIPPGVKQYEYNTYGKVFMHRRTSLKSPITVHTGHKPYQCQECGQAYSCRSHLRMHVRTHNGERPYVCKLCGKTFPRTSSLNRHVRIHTAEKTYECKQCGKAFIDFSSLTSHLRSHTGEKPYKCKECGKAFSYSSTFRRHTITHTGEKPYKCKECAEAFSYSSTFRRHMISHTGEKPHKCKECGEAFSYSSAFRRHMITHTGEKPYECKQCGKTFIYLQSFRRHERIHTGEKPYECKQCGKTFIYPQSFRRHERTHGGEKPYECNQCGKAFSHPSSFRGHMRVHTGEKPYECKQCGKTFNWPISLRKHMRTHTREKPYECKQCGKAFSLSACFREHVRMHPEDKSYECKLCGKAFYCHISLQKHMRRHTAEKLYKCKQCGKAFSWPELLQQHVRTHTVEKPYECKECGKVFKWPSSLPIHMRLHTGEKPYQCKHCGKAFNCSSSLRRHVRIHTTEKQYKCNVGHPPANEFMCSASEKSHQERDLIKVVNMVLPL

SEQ ID NO: 16244 - protein, 456 aa, Homo sapiens
MDTVVFEDVVVDFTLEEWALLNPAQRKLYRDVMLETFKHLASVDNEAQLKASGSISQQDTSGEKLSLKQKIEKFTRKNIWASLLGKNWEEHSVKDKHNTKERHLSRNPRVERPCKSSKGNKRGRTFRKTRNCNRHLRKNCCTSVRRYECSQCGKLFTHSSSLIRHKRAHSGQKLYKCKECGKAFSRPSYLQTHEKTHSGEKPYACQSCGKTFLRSHSLTEHVRTHTGEKPYECGQCGKGFSCPKSFRAHVMMHAGGRPYECKHCGKAFRCQKSFRVHMIMHAGGRPYECKQCGKAYCWATSFQRHVRIHNGEKPYKCGKCGKAFGWPSSLHKHARTHAKKKPVSGGSVGKSSARPRPSTDVKSQTREKVYKCETCGKTYGWSSSLHKHERKHTGEKPVNAASVGKPSGGLCSSKNVRTQIGQKPSKCEKCGKAFSCPKAFQGHVRSHTGKKSCTSK

SEQ ID NO: 16245 - protein, 423 aa, Homo sapiens
MAAVVLPPTAASQREGHTEGGELVNELLKSWLKGLVTFEDVAVEFTQEEWALLDPAQRTLYRDVMLENCRNLASLGNQVDKPRLISQLEQEDKVMTEERGILSGTCPDVENPFKAKGLTPKLHVFRKEQSRNMKMERNHLGATLNECNQCFKVFSTKSSLTRHRKIHTGERPYGCSECGKSYSSRSYLAVHKRIHNGEKPYECNDCGKTFSSRSYLTVHKRIHNGEKPYECSDCGKTFSNSSYLRPHLRIHTGEKPYKCNQCFREFRTQSIFTRHKRVHTGEGHYVCNQCGKAFGTRSSLSSHYSIHTGEYPYECHDCGRTFRRRSNLTQHIRTHTGEKPYTCNECGKSFTNSFSLTIHRRIHNGEKSYECSDCGKSFNVLSSVKKHMRTHTGKKPYECNYCGKSFTSNSYLSVHTRMHNRQM

SEQ ID NO: 16246 - protein, 402 aa, Homo sapiens
MAAVILPSTAAPSSLFPASQQKGHTQGGELVNELLTSWLRGLVTFEDVAVEFTQEEWALLDPAQRTLYRDVMLENCRNLASLGCRVNKPSLISQLEQDKKVVTEERGILPSTCPDLETLLKAKWLTPKKNVFRKEQSKGVKTERSHRGVKLNECNQCFKVFSTKSNLTQHKRIHTGEKPYDCSQCGKSFSSRSYLTIHKRIHNGEKPYECNHCGKAFSDPSSLRLHLRIHTGEKPYECNQCFHVFRTSCNLKSHKRIHTGENHHECNQCGKAFSTRSSLTGHNSIHTGEKPYECHDCGKTFRKSSYLTQHVRTHTGEKPYECNECGKSFSSSFSLTVHKRIHTGEKPYECSDCGKAFNNLSAVKKHLRTHTGEKPYECNHCGKSFTSNSYLSVHKRIHNRWI

SEQ ID NO: 16247 - protein, 538 aa, Homo sapiens
MVAGWLTNYSQDSVTFEDVAVDFTQEEWTLLDQTQRNLYRDVMLENYKNLVAVDWESHINTKWSAPQQNFLQGKTSSVVEMERNHFGEELFDFNQCEKALSEHSCLKTHRRTYFRKKTCECNQCEKAFRKPSIFTLHKKTDIGEELPNCNQCETAFSQHLHLVCKKTSQNLHLVCKKTHTQEKPYKCSDCEKGLPSSSHLRECVRIYGGERPYTHKEYVETFSHSTALFVHMQTQDGEKFYECKACGKPFTESSYLTQHLRTHSRVLPIEHKKFGKAFAFSPDLAKHIRLRTRGKHYVCNECGKEFTCFSKLNIHIRVHTGEKPYECNKCGKAFTDSSGLIKHRRTHTGEKPYECKECGKAFANSSHLTVHMRTHTGEKPYQCKECGKAFINSSSFKSHMQTHPGVKPYDCQQCGKAFIRSSFLIRHLRSHSAERPFECEECGKAFRYSSHLSQHKRIHTGERPYKCQKCGQAFSISSGLTVHMRTHTGERPFECQECGKAFTRSTYLIRHLRSHSVEKPYKECGQTFSNSSCLTECV

SEQ ID NO: 16248 - protein, 161 aa, Homo sapiens
MGPLQFRDVAIEFSLEEWHCLDTAQWNLYRDVMLENYRHLVFLVCGKAFNSSSNLTTHKKIHTGEKPYRCEECGKAFKRSSHLTVHKIVHTGEKSYKCEECGKAFKHPSHVTAHKKIHTGGKPYKCEECGKDFKYTSTLIAHKRIHTGEKPYKCEECGKDF

SEQ ID NO: 16249 - protein, 790 aa, Homo sapiens
MAYCLTNCYQYSVTFEDTAVDFTQEEWILLDPVQRNLYRDVMLENYENVAKVGFQLFKPSVISWLEEEELRTLQQGVLQDWAIKHQTSVSALQQEFWKIQTSNGIQMDLVTFDSVAVEFTQEEWTLLDPAQRNLYSDVMLENYKNLSSVGYQLFKPSLISWLEEEEELSTLPRVLQEWKMCLKTKGPALWQDNFCLKTLNGIQLARNQNGEELYDCKQCEDVFCKHPCLKTNMSTQNRGNTSECIQYAKDLLSLYNKTSTIRKVSVFSKHGKSFRLILNVQVQRKCTQDKSFEGTDYGKAFIYQSYLEAHRKTQSGEKLNEWKQCGEAFTHSTSHAVNVETHIIKNPYECKECGKDFRYPTHLNNHMQTHIGIKPYKCKHCGKTFTVPSGFLEHVRTHTGEKPYGCKECGKAFGTSAGLIEHIRCHAREKTFKCDHCGKAFISYPSLFGHLRVHNGEKPYEHKEYGKAFGTSSGVIEDRRSNTGQKRFDCDQCGKVFVSFSSLFAHLRTHTGEKPFKCYKCGKPFTSSACLRIHMRTHTEERLYQCKKCGKAFTKCSYLTKHLRTHAGEKPYECMKCGKAFTERSYLTKHLRRHSGEKPYECKKCGKAFTERSDLTKHLRRHTGDKPYEYKDCGKAFVVSSSLVDHLRTHTGYKPYKCNACEKAYSRSCVLTQHLKTHAAEKTSECNACGNSFRNSMCFHDRLKTLTKIKPYKCKDCGKAFTCHSDLTNHVRIHTGEKPYKCKECGKAFRTSSGRIQHLRTHMGEKPFECDQCGKAFASFSARIAHLKTH

SEQ ID NO: 16250 - protein, 486 aa, Homo sapiens
MAAIYLSRGFFSREPICPFEEKTKVERMVEDYLASGYQDSVTFDDVAVDFTPEEWALLDTTEKYLYRDVMLENYMNLASVEWEIQPRTKRSSLQQGFLKNQIFSGIQMTRGYSGWKLCDCKNCGEVFREQFCLKTHMRVQNGGNTSEGNCYGKDTLSVHKEASTGQELSKFNPCGKVFTLTPGLAVHLEVLNARQPYKCKECGKGFKYFASLDNHMGIHTDEKLCEFQEYGRAVTASSHLKQCVAVHTGKKSKKTKKCGKSFTNFSQLYAPVKTHKGEKSFECKECGRSFRNSSCLNDHIQIHTGIKPHKCTYCGKAFTRSTQLTEHVRTHTGIKPYECKECGQAFAQYSGLSIHIRSHSGKKPYQCKECGKAFTTSTSLIQHTRIHTGEKPYECVECGKTFITSSRRSKHLKTHSGEKPFVCKICGKAFLYSSRLNVHLRTHTGEKPFVCKECGKAFAVSSRLSRHERIHTGEKPYECKDMSVTI

SEQ ID NO: 16251 - protein, 426 aa, Homo sapiens
MSAFDMSHGFFPREPICPFEEKTKIGTMVEDHRSNSYQDSVTFDDVAVEFTPEEWALLDTTQKYLYRDVMLENYMNLASVDFFFCLTSEWEIQPRTKRSSLQQGFLKNQIFTGIQMQTRSYSGWKLCENCGEVFSEQFCLKTHMRAQNGGNTFEGNCYGKDSISVHKEASIGQELSKFNPCGKVFTLTPGLAVHLEILNGRQPYKCKECGKGFKYFASLDNHMGIHIGEKLCEFQECERAITTSSHLKQCVAVHTGKKSEKTKNCGKSFTNFSQLSAHAKTHKGEKSFECKECGRSFRNSSSFNVHIQIHTGIKPHKCTECGKAFTRSTHLTQHVRTHTGIKPYECKECGQAFTQYTGLAIHIRNHTGEKPYQCKECGKAFNRSSTLTQHRRIHTGEKPYECVECGKTFITSSHRSKHLKTHSGER

SEQ ID NO: 16252 - protein, 476 aa, Homo sapiens
MDAVAFEDVAVNFTQEEWALLGPSQKNLYRYVMQETIRNLDCIRMIWEEQNTEDQYKNPRRNLRCHMVERFSESKDSSQCGETFSLIRDSIVNNSICPGEDPCQSAECEEVIMGHLSLNSHIRVDSGHKPHEYQEYGEKPHTHKQRGKAFSYHHSFQSRGRPHTGKKRYECKECGKTFSSRRNLRRHMVVQGGNRPYKCKLCGKAFFWPSLLRMHERTHTGEKPYECKQCSKAFPFYSSYRRHERMHTGEKPYECKQCSKALPDSSSYIRHERTHTGEKPYTCKQCGKAFSVSSSLRRHETTHSAEKPYECKQCGKTFHHLGSFQIHMKRHTGDRPHKCKICGKGFDRPSLVRYHERIHTGEKPYECKQCGKTLSHSSSFRRHMIMHTGGGPHKCKICGKAFVYPSVCQRHEKSHSGEKPYECKQCGKALSHSSSFRRHMVMHTGDGPNKCKVCGKAFVYPSVCQRHEKTHWRETI

SEQ ID NO: 16253 - protein, 553 aa, Homo sapiens
MDSVASEDVAVNFTLEEWALLDPSQKKLYRDVMRETFRNLACVGKKWEDQSIEDWYKNQGRILRNHMEEGLSESKEYDQCGEAFSQILNLNLNKKIPTIVRPCECSLCGKVFMHHSSLSRHIRSHLGHKPYDYQEYGEKPYKCKQCGKAFSSCQSFRRHERTHTGEKPYACPECGKAFISLPSVRRHMIKHTGDGPYKCQECGKAFDRPSLFQIHERTHTGEKPYECQECAKAFISLPSFQRHMIRHTGDGPYKCQECGKAFDRPSLFRIHERTHTGEKPHECKQCGKAFISFTNFQSHMIRHTGDGPYKCKVCGRAFIFPSYVRKHERTHTGEKPYECNKCGKTFSSSSNVRTHERTHTGEKPYECKECGKAFISLPSVRRHMIKHTGDGPYKCQVCGRAFDCPSSFQIHERTHTGEKPYECQVCGKAFISLKRIRKHMILHTGDGPYKCQVCGKAFDCPSSVRTHERTHTGEKPYECKECGKAFNYASSIRIHERTHTGEKPYECKQCGKTFSYSSSFQRHERAHNGDKPYVKNVGKLSFITQPSNTCENE

SEQ ID NO: 16254 - protein, 539 aa, Homo sapiens
MRRGPWERWSLASHRLDAGLCTCPREESREIRAGQIVLKAMAQGLVTFRDVAIEFSLEEWKCLEPAQRDLYREVTLENFGHLASLGLSISKPDVVSLLEQGKEPWMIANDVTGPWCPDLESRCEKFLQKDIFEIGAFNWEIMESLKCSDLEGSDFRADWECEGQFERQVNEECYFKQVNVTYGHMPVFQHHTSHTVRQSRETGEKLMECHECGKAFSRGSHLIQHQKIHTGEKPFGCKECGKAFSRASHLVQHQRIHTGEKPYDCKDCGKAFGRTSELILHQRLHTGVKPYECKECGKTFRQHSQLILHQRTHTGEKPYVCKDCGKAFIRGSQLTVHRRIHTGARPYECKECGKAFRQHSQLTVHQRIHTGEKPYECKECGKGFIHSSEVTRHQRIHSGEKPYECKECGKAFRQHAQLTRHQRVHTGDRPYECKDCGKAFSRSSYLIQHQRIHTGDKPYECKECGKAFIRVSQLTHHQRIHTCEKPYECRECGMAFIRSSQLTEHQRIHPGIKPYECRECGQAFILGSQLIEHYRIHTG

SEQ ID NO: 16255 - protein, 418 aa, Homo sapiens
MAQESVMFSDVSVDFSQEEWECLNDDQRDLYRDVMLENYSNLVSMGHSISKPNVISYLEQGKEPWLADRELTRGQWPVLESRCETKKLFLKKEIYEIESTQWEIMEKLTRRDFQCSSFRDDWECNRQFKKELGSQGGHFNQLVFTHEDLPTLSHHPSFTLQQIINSKKKFCASKEYRKTFRHGSQFATHEIIHTIEKPYECKECGKSFRHPSRLTHHQKIHTGKKPFECKECGKTFICGSDLTRHHRIHTGEKPYECKECGKAFSSGSNFTRHQRIHTGEKPYECKECGKAFSSGSNFTQHQRIHTGEKPYECKECGNAFSQSSQLIKHQRIHTGEKPYECKECEKAFRSGSDLTRHQRIHTGEKPYECKICGKAYSQSSQLISHHRIHTSEKPYEYRECGKNFNYDPQLIQHQNLYW

SEQ ID NO: 16256 - protein, 647 aa, Homo sapiens
MAQGSVSFNDVTVDFTQEEWQHLDHAQKTLYMDVMLENYCHLISVGCHMTKPDVILKLERGEEPWTSFAGHTCLEENWKAEDFLVKFKEHQEKYSRSVVSINHKKLVKEKSKIYEKTFTLGKNPVNSKNLPPEYDTHGRILKNVSELIISNLNPARKRLSEYNGYGKSLLSTKQETTHPEVKSHNQSARAFSHNEVLMQYQKTETPAQSFGYNDCEKSFLQRGGLITHSRPYKGENPSVYNKKRRATNIEKKHTCNECGKSFCRKSVLILHQGIHSEEKPYQCHQCGNAFRRKSYLIDHQRTHTGEKPFVCNECGKSFRLKTALTDHQRTHTGEKSYECLQCRNAFRLKSHLIRHQRTHTGEKPYECNDCGKSFRQKTTLSLHQRIHTGEKPYICKECGKSFHQKANLTVHQRTHTGEKPYICNECGKSFSQKTTLALHEKTHNEEKPYICSECGKSFRQKTTLVAHQRTHTGEKSYECPHCGKAFRMKSYLIDHHRTHTGEKPYECNECGKSFSQKTNLNLHQRIHTGEKPYVCNECGKSFRQKATLTVHQKIHTGQKSYECPQCGKAFSRKSYLIHHQRTHTGEKPYKCSECGKCFRQKTNLIVHQRTHTGEKPYVCNECGKSFSYKRNLIVHQRTHKGENIEMQ

SEQ ID NO: 16257 - protein, 644 aa, Homo sapiens
MTSQSSVISNSCVTMERLSHMMERKAWCSQESALSEEEEDTTRPLETVTFKDVAVDLTQEEWEQMKPAQRNLYRDVMLENYSNLVTVGCQVTKPDVIFKLEQEEEPWVMEEEMFGRHCPEVWEVDEQIKKQQETLVRKVTSISKKILIKEKVIECKKVAKIFPLSSDIVTSRQSFYDCDSLDKGLEHNLDLLRYEKGCVREKQSNEFGKPFYHCASYVVTPFKCNQCGQDFSHKFDLIRHERIHAGEKPYECKECGKAFSRKENLITHQKIHTGEKPYKCNECGKAFIQMSNLIRHHRIHTGEKPYACKDCWKAFSQKSNLIEHERIHTGEKPYECKECGKSFSQKQNLIEHEKIHTGEKPYACNECGRAFSRMSSVTLHMRSHTGEKPYKCNKCGKAFSQCSVFIIHMRSHTGEKPYVCSECGKAFSQSSSLTVHMRNHTAEKPYECKECGKAFSRKENLITHQKIHTGEKPYECSECGKAFIQMSNLIRHQRIHTGEKPYACTVCGKAFSQKSNLTEHEKIHTGEKPYHCNQCGKAFSQRQNLLEHEKIHTGEKPFKCNECGKAFSRISSLTLHVRSHTGEKPYECNKCGKAFSQCSLLIIHMRSHTGEKPFECNECGKAFSQRASLSIHKRGHTGERHQVY

SEQ ID NO: 16258 - protein, 686 aa, Homo sapiens
MTESQGTVTFKDVAIDFTQEEWKRLDPAQRKLYRNVMLENYNNLITVGYPFTKPDVIFKLEQEEEPWVMEEEVLRRHWQGEIWGVDEHQKNQDRLLRQVEVKFQKTLTEEKGNECQKKFANVFPLNSDFFPSRHNLYEYDLFGKCLEHNFDCHNNVKCLMRKEHCEYNEPVKSYGNSSSHFVITPFKCNHCGKGFNQTLDLIRHLRIHTGEKPYECSNCRKAFSHKEKLIKHYKIHSREQSYKCNECGKAFIKMSNLIRHQRIHTGEKPYACKECEKSFSQKSNLIDHEKIHTGEKPYECNECGKAFSQKQSLIAHQKVHTGEKPYACNECGKAFPRIASLALHMRSHTGEKPYKCDKCGKAFSQFSMLIIHVRIHTGEKPYECNECGKAFSQSSALTVHMRSHTGEKPYECKECRKAFSHKKNFITHQKIHTREKPYECNECGKAFIQMSNLVRHQRIHTGEKPYICKECGKAFSQKSNLIAHEKIHSGEKPYECNECGKAFSQKQNFITHQKVHTGEKPYDCNECGKAFSQIASLTLHLRSHTGEKPYECDKCGKAFSQCSLLNLHMRSHTGEKPYVCNECGKAFSQRTSLIVHMRGHTGEKPYECNKCGKAFSQSSSLTIHIRGHTGEKPFDCSKCGKAFSQISSLTLHMRKHTGEKPYHCIECGKAFSQKSHLVRHQRIHTH

SEQ ID NO: 16259 - protein, 555 aa, Homo sapiens
MDSVVFEDVAVDFTLEEWALLDSAQRDLYRDVMLETFRNLASVDDGTQFKANGSVSLQDMYGQEKSKEQTIPNFTGNNSCAYTLEKNCEGYGTEDHHKNLRNHMVDRFCTHNEGNQYGEAIHQMPDLTLHKKVSAGEKPYECTKCRTVFTHLSSLKRHVKSHCGRKAPPGEECKQACICPSHLHSHGRTDTEEKPYKCQACGQTFQHPRYLSHHVKTHTAEKTYKCEQCRMAFNGFASFTRHVRTHTKDRPYKCQECGRAFIYPSTFQRHMTTHTGEKPYKCQHCGKAFTYPQAFQRHEKTHTGEKPYECKQCGKTFSWSETLRVHMRIHTGDKLYKCEHCGKAFTSSRSFQGHLRTHTGEKPYECKQCGKAFTWSSTFREHVRIHTQEQLYKCEQCGKAFTSSRSFRGHLRTHTGEKPYECKQCGKTFTWSSTFREHVRIHTQEQLHKCEHCGKAFTSSRAFQGHLRMHTGEKPYECKQCGKTFTWSSTLHNHVRMHTGEKPHKCKQCGMSFKWHSSFRNHLRMHTGQKSHECQSYSKAFSCQVILSKTSESTH

SEQ ID NO: 16260 - protein, 536 aa, Homo sapiens; identical to SEQ ID NO: 14453

SEQ ID NO: 16261 - protein, 609 aa, Homo sapiens
MPHLLVTFRDVAIDFSQEEWECLDPAQRDLYRDVMLENYSNLISLDLESSCVTKKLSPEKEIYEMESLQWENMGKRINHHLQYNGLGDNMECKGNLEGQEASQEGLYMCVKITCEEKATESHSTSSTFHRIIPTKEKLYKCKECRQGFSYLSCLIQHEENHNIEKCSEVKKHRNTFSKKPSYIQHQRIQTGEKPYECMECGKAFGRTSDLIQHQKIHTNEKPYQCNACGKAFIRGSQLTEHQRVHTGEKPYECKKCGKAFSYCSQYTLHQRIHSGEKPYECKDCGKAFILGSQLTYHQRIHSGEKPYECKECGKAFILGSHLTYHQRVHTGEKPYICKECGKAFLCASQLNEHQRIHTGEKPYECKECGKTFFRGSQLTYHLRVHSGERPYKCKECGKAFISNSNLIQHQRIHTGEKPYKCKECGKAFICGKQLSEHQRIHTGEKPFECKECGKAFIRVAYLTQHEKIHGEKHYECKECGKTFVRATQLTYHQRIHTGEKPYKCKECDKAFIYGSQLSEHQRIHRGEKPYECKQCGKAFIRGSHLTEHLRTHTGEKPYECKECGRAFSRGSELTLHQRIHTGEKPYTCVQCGKDFRCPSQLTQHTRLHN

SEQ ID NO: 16262 - protein, 529 aa, Homo sapiens
MEQEKKLLVSDSNSFMERESLKSPFTGDTSMNNLETVHHNNSKADKLKEKPSEWSKRHRPQHYKHEDAKEMPLTWVQDEIWCHDSYESDGKSENWGNFIAKEEEKPNHQEWDSGEHTNACVQQNSSFVDRPYKCSECWKSFSNSSHLRTHQRTHSGEKPYKCSECAKCFCNSSHLIQHLRMHTGEKPYQCGECGKSFSNTSHLIIHERTHTGEKPYKCPECGKRFSSSSHLIQHHRSHTGEKPYECSVCGKGFSHSYVLIEHQRTHTGEKPYKCPDCGKSFSQSSSLIRHQRTHTGEKPYKCLECEKSFGCNSTLIKHQRIHTGEKPYQCPECGKNFSRSSNLITHQKMHTGEKSYESSEYEESLGQNCNVIEECRIQLGEKPYRCCECGKSFGLSSHLIRHQRTHTGEKPYRCSECWKTFSQSSTLVIHQRTHTGEKPYKCPDCGESFSQSFNLIRHRRTHIGEKPYKCTSCEKCFSRSAYLSQHRKIHVEKPFESPDVGDFPHEWTWKNCSGEMPFISSFSVSNSSS

SEQ ID NO: 16263 - protein, 665 aa, Homo sapiens
MFPVLEPHQVGLIRSYNSKTMTCFQELVTFRDVAIDFSRQEWEYLDPNQRDLYRDVMLENYRNLVSLGGHSISKPVVVDLLERGKEPWMILREETQFTDLDLQCEIISYIEVPTYETDISSTQLQSIYKREKLYECKKCQKKFSSGYQLILHHRFHVIERPYECKECGKNFRSGYQLTLHQRFHTGEKPYECTECGKNFRSGYQLTVHQRFHTGEKTYECRQCGKAFIYASHIVQHERIHTGGKPYECQECGRAFSQGGHLRIHQRVHTGEKPYKCKECGKTFSRRSNLVEHGQFHTDEKPYICEKCGKAFRRGHQLTVHQRVHTGKKPYECKECGKGYTTASYFLLHQRIHKGGKPYECKECKKTFTLYRNLTRHQNIHTGEKLFECKQCGKTYTTGSKLFQHQKTHTGEKPYECKECGKAFSLYGYLKQHQKIHTGMKHFECKECKKTFTLYRNLTRHQNIHTGKKLFECQECGKAYSTGSNLIQHRKTHTGEKPYKCKECGKTFSLHGYLNQHQKIHTGMKPYECKVCRKTFTFYRNLTLHQSIHTDEKPFECKECGKTFRRSSHLTAHQSIHADKKPYECKECGKAFKMYGYLTQHQKIHTGGKPYECKECGKAFSRASNLVQHERIHTGEKPYVCKQCGKTFRYGSALKAHQRIHRSIKV

SEQ ID NO: 16264 - protein, 896 aa, Homo sapiens
MTEESEETVLYIEHRYVCSECNQLYGSLEEVLMHQNSHVPQQHFELVGVADPGVTVATDTASGTGLYQTLVQESQYQCLECGQLLMSPSQLLEHQELHLKMMAPQEAVPAEPSPKAPPLSSSTIHYECVDCKALFASQELWLNHRQTHLRATPTKAPAPVVLGSPVVLGPPVGQARVAVEHSYRKAEEGGEGATVPSAAATTTEVVTEVELLLYKCSECSQLFQLPADFLEHQATHFPAPVPESQEPALQQEVQASSPAEVPVSQPDPLPASDHSYELRNGEAIGRDRRGRRARRNNSGEAGGAATQELFCSACDQLFLSPHQLQQHLRSHREGVFKCPLCSRVFPSPSSLDQHLGDHSSESHFLCVDCGLAFGTEALLLAHRRAHTPNPLHSCPCGKTFVNLTKFLYHRRTHGVGGVPLPTTPVPPEEPVIGFPEPAPAETGEPEAPEPPVSEETSAGPAAPGTYRCLLCSREFGKALQLTRHQRFVHRLERRHKCSICGKMFKKKSHVRNHLRTHTGERPFPCPDCSKPFNSPANLARHRLTHTGERPYRCGDCGKAFTQSSTLRQHRLVHAQHFPYRCQECGVRFHRPYRLLMHRYHHTGEYPYKCRECPRSFLLRRLLEVHQLVVHAGRQPHRCPSCGAAFPSSLRLREHRCAAAAAQAPRRFECGTCGKKVGSAARLQAHEAAHAAAGPGEVLAKEPPAPRAPRATRAPVASPAALGSTATASPAAPARRRGLECSECKKLFSTETSLQVHRRIHTGERPYPCPDCGKAFRQSTHLKDHRRLHTGERPFACEVCGKAFAISMRLAEHRRIHTGERPYSCPDCGKSYRSFSNLWKHRKTHQQQHQAAVRQQLAEAEAAVGLAVMETAVEALPLVEAIEIYPLAEAEGVQISG

SEQ ID NO: 16265 - protein, 245 aa, Homo sapiens
MLERGAESAAGATDPSPTGKEPVTKEAPHQGPPQKPSQSAPGPTASAGSPPRPRRRPPPQRPHRCPDCDKAFSYPSKLATHRLAHGGARPHPCPDCPKAFSYPSKLAAHRLTHSGARPHPCPHCPKSFGHRSKLAAHLWTHAPTRPYPCPDCPKSFCYPSKLAAHRHTHHATDARPYPCPHCPKAFSFPSKLAAHRLCHDPPTAPGSQATAWHRCSSCGQAFGQRRLLLLHQRSHHQVEHKGERD

SEQ ID NO: 16266 - protein, 715 aa, Homo sapiens
MSSPKRSSKPSMSLAPSGSSMPTADPKPPASLKSTKSATPNRSLVPTKPATSRNSVMSPSSSKSTKSTSTKRAPSNRPSSRSRVRSKARTPSRVSTDTRTSKASKASDVRCHQRRGTHSRGRTPGRRGSRSSKRSPSRASTPGRIRTHGARPGMASRVRTPTSQQKGSRGKSYGRPRTSNRERSDSQPRNLSKKSYRPPGGSGIGRSSELAVTPSTAKCQTPTGIPSKEKSDNPSPSSSRKVKSYGQMIIPSREKSYSPTEMSSRVKSYNQASTRSRPQSHSQSRSPRRSRSGSQKRTHSRVRSHSWKRNHSRARSRTRKGILSQMGRHSQSRSHSKGKSQNQSRTPRRGRSHNWSRNPSKERSHSHSRSSSKERDHRGSSSPRKESGRSQSGSPNKQRDHSRSRSPNKARDRSRSRSPYKARDRSRSRSPNKARDCSRSRSPYKARDRSRSRSPNKARDHSRSRSPNKARDRSRSRSPSKERDHSQLGSPSKERDHRRSRSPSKERQCRQSRSSSKERDHRRSRSPSKERQRRQSRSPNKERDRSQSRSPSEEREHRQSRSPSKERDRRRWRSPSKERERRQSRSSSEERDHSRSRSPNKQSGYSRPRASSKEKAHSRSRTPSKEGNHSQSRTSSKESDPSQSTVPRSPDWKRSPTRTSSLSQNRTPSKTSSHSPSTFPSGGQTLSQDDSQADATTSKATLPGERSSSSSSKLA

SEQ ID NO: 16267 - protein, 170 aa, Homo sapiens
MEDPNPEENMKQQDSPKERSPQSPGGNICHLGAPKCTRCLITFADSKFQERHMKREHPADFVAQKLQGVLFICFTCARSFPSSKALITHQRSHGPAAKPTLPVATTTAQPTFPCPDCGKTFGQAVSLRRHRQMHEVRAPPGTFACTECGQDFAQEAGLHQHYIRHARGEL

SEQ ID NO: 16268 - protein, 485 aa, Homo sapiens
MKNATIVMSVRREQGSSSGEGSLSFEDVAVGFTREEWQFLDQSQKVLYKEVMLENYINLVSIGYRGTKPDSLFKLEQGEPPGIAEGAAHSQICPGFVIQSRRYAGKDSDAFGGYGRSCLHIKRDKTLTGVKYHRCVKPSSPKSQLNDLQKICAGGKPHECSVCGRAFSRKAQLIQHQRTERGEKPHGCGECGKTFMRKIQLTEHQRTHTGEKPHECSECGKAFSRKSQLMVHQRTHTGEKPYRCSKCGKAFSRKCRLNRHQRSHTGEKLYGCSVCGKAFSQKAYLTAHQRLHTGDKPYKCSDCGRTFYFKSDLTRHQRIHTGEKPYECSECEKAFRSKSKLIQHQRTHTGERPYSCRECGKAFAHMSVLIKHEKTHIRETAINSLTVEKPSSRSHTSLYMSELIQEQKTVNTVPIEMPSSGTPPLLNKSERLVGRNVVIVEQPFPRNQAFVVNQEFEQRISLTNEVNVAPSVINYILYLTDIVSE

SEQ ID NO: 16269 - protein, 590 aa, Homo sapiens
MLHEEAAQKRKGKEPGMALPQGRLTFRDVAIEFSLAEWKFLNPAQRALYREVMLENYRNLEAVDISSKRMMKEVLSTGQGNTEVIHTGMLQRHESYHTGDFCFQEIEKDIHDFEFQSQKDERNGHEASMPKIKELMGSTDRHDQRHAGNKPIKDQLGLSFHLHLPELHIFQPEEKIANQVEKSVNDASSISTSQRISCRPETHTPNNYGNNFFHSSLLTQKQEVHMREKSFQCNETGEAFNCSSFVRKHQIIHLGEKQYKFDICGKVFNEKRYLARHRRCHTSEKPYKCNECGKSFSYKSSLTCHRRCHTGEKPYKCNECGKSFSYKSSLTCHHRCHTGEKPYKCNECGKSFSYKSSLRCHRRLHTGIKPYKCNECGKMFGQNSTLVIHKAIHTGEKPYKCNECGKAFNQQSHLSRHHRLHTGEKPYKCNDCGKAFIHQSSLARHHRLHTGEKSYKCEECDRVFSQKSNLERHKIIHTGEKPYKCNECHKTFSHRSSLPCHRRLHSGEKPYKCNECGKTFNVQSHLSRHHRLHTGEKPYKCKVCDKAFMCHSYLANHTRIHSGEKPYKCNECGKAHNHLIDSSIKPCMSS

SEQ ID NO: 16270 - protein, 562 aa, Homo sapiens
MDPQPPPPAQGSPPHRGRGRGRGRGRGRGRGRGRGGAGAPRAPLPCPTCGRLFRFPYYLSRHRLSHSGLRPHACPLCPKAFRRPAHLSRHLRGHGPQPPLRCAACPRTFPEPAQLRRHLAQEHAGGEVELAIERVAKETAEPSWGPQDEGSEPPTTAAAGATEEEAVAAWPETWPAGEPSTLAAPTSAAEPRESESEEAEAGAAELRAELALAAGRQEEKQVLLQADWTLLCLRCREAFATKGELKAHPCLRPEGEQEGEGGPPPRPKRHQCSICLKAFARPWSLSRHRLVHSTDRPFVCPDCGLAFRLASYLRQHRRVHGPLSLLAPLPAAGKKDDKASGARNSAKGPEGGEGAECGGASEGGEGQNGGDAAPARPPAGEPRFWCPECGKGFRRRAHLRQHGVTHSGARPFQCVRCQREFKRLADLARHAQVHAGGPAPHPCPRCPRRFSRAYSLLRHQRCHRAELERAAALQALQAQAPTSPPPPPPPLKAEQEEEGLPLPLANIKEEPPSPGTPPQSPPAPPVFLSASCFDSQDHSAFEMEEEEVDSKAHLRGLGGLAS

SEQ ID NO: 16271 - protein, 172 aa, Homo sapiens
MLLLPPRPPHPRSSSPEAMDPPPPKAPPFPKAEGPSSTPSSAAGPRPPRLGRHLLIDANGVPYTYTVQLEEEPRGPPQREAPPGEPGPRKGYSCPECARVFASPLRLQSHRVSHSDLKPFTCGACGKAFKRSSHLSRHRATHRARAGPPHTCPLCPRRFQDAAELAQHVRLH

SEQ ID NO: 16272 - protein, 197 aa, Homo sapiens
MLVLPSPCPQPLAFSSVETMEGPPRRTCRSPEPGPSSSIGSPQASSPPRPNHYLLIDTQGVPYTVLVDEESQREPGASGAPGQKKCYSCPVCSRVFEYMSYLQRHSITHSEVKPFECDICGKAFKRASHLARHHSIHLAGGGRPHGCPLCPRRFRDAGELAQHSRVHSGERPFQCPHCPRRFMEQNTLQKHTRWKHP

SEQ ID NO: 16273 - protein, 517 aa, Homo sapiens
MSLGSELFRDVAIVFSQEEWQWLAPAQRDLYRDVMLETYSNLVSLGLAVSKPDVISFLEQGKEPWMVERVVSGGLCPVLESRYDTKELFPKQHVYEVESPQWEIMESLTSYGLECSSFQDDWECRNQFDRQQGNPDRHFHQMIIRHEEMPTFDQHASLTFYQKIHTREKPFGYNKCRKDFWQKELLINHQGIYTNEKPYKCKECGKAFKYGSRLIQHENIHSGKKPYECKECGKAFNSGSNFIQHQRVHTGEKPYECKDCEKAFSRSSQLIEHQRTHTGEKPYQCKECGKAFNRISHLKVHYRIHTGEKPYACKECGKTFSHRSQLIQHQTVHTGRKLYECKECGKAFNQGSTLIRHQRIHTGEKPYECKVCGKAFRVSSQLKQHQRIHTGEKPYQCKVCGRAFKRVSHLTVHYRIHTGEKPYECKECGKAFSHCSQLIHHQVIHTEKKPYEYKECEKTLSHDSTTVQPQRMHNRETHVNIINVEKPSISSYPLLIIREFMLASNHMNGSNGESPLA

SEQ ID NO: 16274 - protein, 569 aa, Homo sapiens
MSKDLVTFGDVAVNFSQEEWEWLNPAQRNLYRKVMLENYRSLVSLGVSVSKPDVISLLEQGKEPWMVKKEGTRGPCPDWEYVFKNSEFSSKQETYEESSKVVTVGARHLSYSLDYPSLREDCQSEDWYKNQLGSQEVHLSQLIITHKEILPEVQNKEYNKSWQTFHQDTIFDIQQSFPTKEKAHKHEPQKKSYRKKSVEMKHRKVYVEKKLLKCNDCEKVFNQSSSLTLHQRIHTGEKPYACVECGKTFSQSANLAQHKRIHTGEKPYECKECRKAFSQNAHLAQHQRVHTGEKPYQCKECKKAFSQIAHLTQHQRVHTGERPFECIECGKAFSNGSFLAQHQRIHTGEKPYVCNVCGKAFSHRGYLIVHQRIHTGERPYECKECRKAFSQYAHLAQHQRVHTGEKPYECKVCRKAFSQIAYLDQHQRVHTGEKPYECIECGKAFSNSSSLAQHQRSHTGEKPYMCKECRKTFSQNAGLAQHQRIHTGEKPYECNVCGKAFSYSGSLTLHQRIHTGERPYECKDCRKSFRQRAHLAHHERIHTMESFLTLSSPSPSTSNQLPRPVGFIS

SEQ ID NO: 16275 - protein, 421 aa, Homo sapiens
MAGEAEAQLDPSLQGLVMFEDVTVYFSREEWGLLNVTQKGLYRDVMLENFALVSSLGLAPSRSPVFTQLEDDEQSWVPSWVDVTPVSRAEARRGFGLDGLCRVEDERAHPEHLKSYRVIQHQDTHSEGKPRRHTEHGAAFPPGSSCGQQQEVHVAEKLFKCSDCGKVFLKAFALLDHLITHSEERPFRCPTGRSAFKKSAHINPRKIHTGETAHVCNECGKAFSYPSKLRKHQKVHTGIKPFKCSDCGKTFNRKDALVLHQRIHTGERPYECSKCGKTFSVLSTLIRHRKVHIGERPYECTECGKFFKYNNSFILHQRVHTGERPFECKQCGKGYVTRSGLYQHWKVHTGERPYECSLCGKTFTTRSYRNRHQQFHTEERSYECTECGKAFKHSSTLLQHKKVHTPERRQEDRAHGKVVSC

SEQ ID NO: 16276 - protein, 769 aa, Homo sapiens
MPANWTSPQKSSALAPEDHGSSYEGSVSFRDVAIDFSREEWRHLDPSQRNLYRDVMLETYSHLLSVGYQVPEAEVVMLEQGKEPWALQGERPRQSCPGEKLWDHNQCRKILSYKQVSSQPQKMYPGEKAYECAKFEKIFTQKSQLKVHLKVLAGEKLYVCIECGKAFVQKPEFIIHQKTHMREKPFKCNECGKSFFQVSSLFRHQRIHTGEKLYECSQCGKGFSYNSDLSIHEKIHTGERHHECTDCGKAFTQKSTLKMHQKIHTGERSYICIECGQAFIQKTHLIAHRRIHTGEKPYECSNCGKSFISKSQLQVHQRVHTRVKPYICTEYGKVFSNNSNLVTHKKVQSREKSSICTECGKAFTYRSELIIHQRIHTGEKPYECSDCGKAFTQKSALTVHQRIHTGEKSYICMKCGLAFIQKAHLIAHQIIHTGEKPHKCGHCGKLFTSKSQLHVHKRIHTGEKPYMCNKCGKAFTNRSNLITHQKTHTGEKSYICSKCGKAFTQRSDLITHQRIHTGEKPYECNTCGKAFTQKSHLNIHQKIHTGERQYECHECGKAFNQKSILIVHQKIHTGEKPYVCTECGRAFIRKSNFITHQRIHTGEKPYECSDCGKSFTSKSQLLVHQPVHTGEKPYVCAECGKAFSGRSNLSKHQKTHTGEKPYICSECGKTFRQKSELITHHRIHTGEKPYECSDCGKSFTKKSQLQVHQRIHTGEKPYVCAECGKAFTDRSNLNKHQTTHTGDKPYKCGICGKGFVQKSVFSVHQSSHA

SEQ ID NO: 16277 - protein, 769 aa, Homo sapiens
MPASWTSPQKSSALAPEDHGSSYEGSVSFRDVAIDFSREEWRHLDLSQRNLYRDVMLETYSHLLSVGYQVPKPEVVMLEQGKEPWALQGERPRHSCPGEKLWDHNQHRKIIGYKPASSQDQKIYSGEKSYECAEFGKSFTWKSQFKVHLKVPTGEKLYVCIECGRAFVQKPEFITHQKTHMREKPYKCNECGKSFFQVSSLFRHHRIHTGEKLYECSECGKGFPYNSDLSIHEKIHTGERHHECTDCGKAFTQKSTLKIHQKIHTGERSYICIECGQAFIQKTQLIAHRRIHSGEKPYECNNCGKSFISKSQLQVHQRVHTRVKPYICTEYGKVFSNNSNLITHEKIQSREKSSICTECGKAFTYRSELIIHQRIHTGEKPYECSDCGRAFTQKSALTVHQRIHTGEKSYICMKCGLAFIRKAHLITHQIIHTGEKPYKCGHCGKLFTSKSQLHVHKRIHTGEKPYVCNKCGKAFTNRSNLITHQKTHTGEKSYICSKCGKAFTQRSDLITHQRIHTGEKPYECNTCGKAFTQKSNLNIHQKIHTGERQYECHECGKAFNQKSILIVHQKIHTGEKPYVCTECGRAFIRKSNFITHQRIHTGEKPYECSDCGKSFTSKSQLLVHQPVHTGEKPYVCAECGKAFSGRSNLSKHQKTHTGEKPYICSECGKTFRQKSELITHHRIHTGEKPYECSDCGKSFTKKSQLQVHQRIHTGEKPYVCAECGKAFSNRSNLNKHQTTHTGDKPYKCGICGKGFVQKSVFSVHQSSHA

SEQ ID NO: 16278 - protein, 402 aa, Homo sapiens
MAAAAALRAPAQSSVTFEDVAVNFSLEEWSLLNEAQRCLYRDVMLETLTLISSLGCWHGGEDEAAPSKQSTCIHIYKDQGGHSGERPYECGEYRKLFKNKSCLTEPRRDHKHRNVRTGERPYECSKYGKLFHQKPTLHIHERFHTGQKTYECSECGKSFHQSSSLLQRQTLHTRERPYECIECGKAFAEKSSLINHRKVHSGAKRYECNECGKSFAYTSSLIKHRRIHTGERPYECSECGRSFAENSSLIKHLRVHTGERPYECVECGKSFRRSSSLLQHQRVHTRERPYECSECGKSFSLRSNLIHHQRVHTGERHECGQCGKSFSRKSSLIIHLRVHTGERPYECSDCGKSFAENSSLIKHLRVHTGERPYECIDCGKSFRHSSSFRRHQRVHTGMRPYK

SEQ ID NO: 16279 - protein, 575 aa, Homo sapiens
MAAAVPRRPTQQGTVTFEDVAVNFSQEEWCLLSEAQRCLYRDVMLENLALISSLGCWCGSKDEEAPCKQRISVQRESQSRTPRAGVSPKKAHPCEMCGLILEDVFHFADHQETHHKQKLNRSGACGKNLDDTAYLHQHQKQHIGEKFYRKSVREASFVKKRKLRVSQEPFVFREFGKDVLPSSGLCQEEAAVEKTDSETMHGPPFQEGKTNYSCGKRTKAFSTKHSVIPHQKLFTRDGCYVCSDCGKSFSRYVSFSNHQRDHTAKGPYDCGECGKSYSRKSSLIQHQRVHTGQTAYPCEECGKSFSQKGSLISHQLVHTGEGPYECRECGKSFGQKGNLIQHQQGHTGERAYHCGECGKSFRQKFCFINHQRVHTGERPYKCGECGKSFGQKGNLVHHQRGHTGERPYECKECGKSFRYRSHLTEHQRLHTGERPYNCRECGKLFNRKYHLLVHERVHTGERPYACEVCGKLFGNKHSVTIHQRIHTGERPYECSECGKSFLSSSALHVHKRVHSGQKPYKCSECGKSFSECSSLIKHRRIHTGERPYECTKCGKTFQRSSTLLHHQSSHRRKAL

SEQ ID NO: 16280 - protein, 364 aa, Homo sapiens
MWAPREQLLGWTAEALPAKDSAWPWEEKPRYLGPVTFEDVAVLFTEAEWKRLSLEQRNLYKEVMLENLRNLVSLAESKPEVHTCPSCPLAFGSQQFLSQDELHNHPIPGFHAGNQLHPGNPCPEDQPQSQHPSDKNHRGAEAEDQRVEGGVRPLFWSTNERGALVGFSSLFQRPPISSWGGNRILEIQLSPAQNASSEEVDRISKRAETPGFGAVTFGECALAFNQKSNLFRQKAVTAEKSSDKRQSQVCRECGRGFSRKSQLIIHQRTHTGEKPYVCGECGRGFIVESVLRNHLSTHSGEKPYVCSHCGRGFSCKPYLIRHQRTHTREKSFMCTVCGRGFREKSELIKHQRIHTGDKPYVCRD

SEQ ID NO: 16281 - protein, 1267 aa, Homo sapiens
MGDMKTPDFDDLLAAFDIPDPTSLDAKEAIQTPSEENESPLKPPGICMDESVSLSHSGSAPDVPAVSVIVKNTSRQESFEAEKDHITPSLLHNGFRGSDLPPDPHNCGKFDSTFMNGDSARSFPGKLEPPKSEPLPTFNQFSPISSPEPEDPIKDNGFGIKPKHSDSYFPPPLGCGAVGGPVLEALAKFPVPELHMFDHFCKKEPKPEPLPLGSQQEHEQSGQNTVEPHKDPDATRFFGEALEFNSHPSNSIGESKGLARELGTCSSVPPRQRLKPAHSKLSSCVAALVALQAKRVASVTKEDQPGHTKDLSGPTKESSKGSPKMPKSPKSPRSPLEATRKSIKPSDSPRSICSDSSSKGSPSVAASSPPAIPKVRIKTIKTSSGEIKRTVTRILPDPDDPSKSPVGSPLGSAIAEAPSEMPGDEVPVEEHFPEAGTNSGSPQGARKGDESMTKASDSSSPSCSSGPRVPKGAAPGSQTGKKQQSTALQASTLAPANLLPKAVHLANLNLVPHSVAASVTAKSSVQRRSQPQLTQMSVPLVHQVKKAAPLIVEVFNKVLHSSNPVPLYAPNLSPPADSRIHVPASGYCCLECGDAFALEKSLSQHYGRRSVHIEVLCTLCSKTLLFFNKCSLLRHARDHKSKGLVMQCSQLLVKPISADQMFVSAPVNSTAPAAPAPSSSPKHGLTSGSASPPPPALPLYPDPVRLIRYSIKCLECHKQMRDYMVLAAHFQRTTEETEGLTCQVCQMLLPNQCSFCAHQRIHAHKSPYCCPECGVLCRSAYFQTHVKENCLHYARKVGYRCIHCGVVHLTLALLKSHIQERHCQVFHKCAFCPMAFKTASSTADHSATQHPTQPHRPSQLIYKCSCEMVFNKKRHIQQHFYQNVSKTQVGVFKCPECPLLFVQKPELMQHVKSTHGVPRNVDELSSLQSSADTSSSRPGSRVPTEPPATSVAARSSSLPSGRWGRPEAHRRVEARPRLRNTGWTCQECQEWVPDRESYVSHMKKSHGRTLKRYPCRQCEQSFHTPNSLRKHIRNNHDTVKKFYTCGYCTEDSPSFPRPSLLESHISLMHGIRNPDLSQTSKVKPPGGHSPQVNHLKRPVSGVGDAPGTSNGATVSSTKRHKSLFQCAKCSFATDSGLEFQSHIPQHQVDSSTAQCLLCGLCYTSASSLSRHLFIVHKVRDQEEEEEEEAAAAEMAVEVAEPEEGSGEEVPMETRENGLEECAGEPLSADPEARRLLGPAPEDDGGHNDHSQPQASQDQDSHTLSPQV

SEQ ID NO: 16282 - protein, 134 aa, Homo sapiens
MGRSRRTGAHRAHSLARQMKAKRRRPDLDEIHRELRPQGSARPQPDPNAEFDPDLPGGGLHRCLACARYFIDSTNLKTHFRSKDHKKRLKQLSVEPYSQEEAERAAGMGSYVPPRRLAVPTEVSTEVPEMDTST

SEQ ID NO: 16283 - protein, 807 aa, Homo sapiens
MKEWKSKMEISEEKKSARAASEKLQRQITQECELVETSNSEDRLLKHWVSPLKDAMRHLPSQESGIREMHIIPQKAIVGEIGHGCNEGEKILSAGESSHRYEVSGQNFKQKSGLTEHQKIHNINKTYECKECEKTFNRSSNLIIHQRIHTGNKPYVCNECGKDSNQSSNLIIHQRIHTGKKPYICHECGKDFNQSSNLVRHKQIHSGGNPYECKECGKAFKGSSNLVLHQRIHSRGKPYLCNKCGKAFSQSTDLIIHHRIHTGEKPYECYDCGQMFSQSSHLVPHQRIHTGEKPLKCNECEKAFRQHSHLTEHQRLHSGEKPYECHRCGKTFSGRTAFLKHQRLHAGEKIEECEKTFSKDEELREEQRIHQEEKAYWCNQCGRNFQGTSDLIRHQVTHTGEKPYECKECGKTFNQSSDLLRHHRIHSGEKPCVCSKCGKSFRGSSDLIRHHRVHTGEKPYECSECGKAFSQRSHLVTHQKIHTGEKPYQCTECGKAFRRRSLLIQHRRIHSGEKPYECKECGKLFIWRTAFLKHQSLHTGEKLECEKTFSQDEELRGEQKIHQEAKAYWCNQCGRAFQGSSDLIRHQVTHTREKPYECKECGKTFNQSSDLLRHHRIHSGEKPYVCNKCGKSFRGSSDLIKHHRIHTGEKPYECSECGKAFSQRSHLATHQKIHTGEKPYQCSECGNAFRRRSLLIQHRRLHSGEKPYECKECGKLFMWHTAFLKHQRLHAGEKLEECEKTFSKDEELRKEQRTHQEKKVYWCNQCSRTFQGSSDLIRHQVTHTREKPYECKECGKTQSELRPSETS

SEQ ID NO: 16284 - protein, 648 aa, Homo sapiens
MELVTFRDVAIEFSPEEWKCLDPAQQNLYRDVMLENYRNLVSLGFVISNPDLVTCLEQIKEPCNLKIHETAAKPPAICSPFSQDLSPVQGIEDSFHKLILKRYEKCGHENLQLRKGCKRVNECKVQKGVNNGVYQCLSTTQSKIFQCNTCVKVFSKFSNSNKHKIRHTGEKPFKCTECGRSFYMSHLTQHTGIHAGEKPYKCEKCGKAFNRSTSLSKHKRIHTGEKPYTCEECGKAFRRSTVLNEHKKIHTGEKPYKCEECGKAFTRSTTLNEHKKIHTGEKPYKCKECGKAFRWSTSLNEHKNIHTGEKPYKCKECGKAFRQSRSLNEHKNIHTGEKPYTCEKCGKAFNQSSSLIIHRSIHSEQKLYKCEECGKAFTWSSSLNKHKRIHTGEKPYTCEECGKAFYRSSHLAKHKRIHTGEKPYTCEECGKAFNQSSTLILHKRIHSGQKPYKCEECGKAFTRSTTLNEHKKIHTGEKPYKCEECGKAFIWSASLNEHKNIHTGEKPYKCKECGKAFNQSSGLIIHRSIHSEQKLYKCEECGKAFTRSTALNEHKKIHSGEKPYKCKECGKAYNLSSTLTKHKRIHTGEKPFTCEECGKAFNWSSSLTKHKIIHTGEKSYKCEECGKAFNRPSTLTVHKRIHTGKEHS

SEQ ID NO: 16285 - protein, 504 aa, Homo sapiens
MPSPDSMTFEDIIVDFTQEEWALLDTSQRKLFQDVMLENISHLVSIGKQLCKSVVLSQLEQVEKLSTQRISLLQGREVGIKHQEIPFIQHIYQKGTSTISTMRSHTQEDPFLCNDLGEDFTQHIALTQNVITYMRTKHFVSKKFGKIFSDWLSFNQHKEIHTKCKSYGSHLFDYAFIQNSALRPHSVTHTREITLECRVCGKTFSKNSNLRRHEMIHTGEKPHGCHLCGKAFTHCSDLRKHERTHTGEKPYGCHLCGKAFSKSSNLRRHEMIHTREKAQICHLCGKAFTHCSDLRKHERTHLGDKPYGCLLCGKAFSKCSYLRQHERTHNGEKPYECHLCGKAFSHCSHLRQHERSHNGEKPHGCHLCGKAFTESSVLKRHERIHTGEKPYECHVCGKAFTESSDLRRHERTHTGEKPYECHLCGKAFNHSSVLRRHERTHTGEKPYECNICGKAFNRSYNFRLHRRVHTGEKPYVCPLCGKAFSKFFNLRQHERTHTKKAMNM

SEQ ID NO: 16286 - protein, 424 aa, Homo sapiens
MASMPPTPEAQGPILFEDLAVYFSQEECVTLHPAQRSLSKDGTKESLEDAALMGEEGKPEINQQLSLESMELDELALEKYPIAAPLVPYPEKSSEDGVGNPEAKILSGTPTYKRRVISLLVTIENHTPLVELSEYLGTNTLSEILDSPWEGAKNVYKCPECDQNFSDHSYLVLHQKIHSGEKKHKCGDCGKIFNHRANLRTHRRIHTGEKPYKCAKCSASFRQHSHLSRHMNSHVKEKPYTCSICGRGFMWLPGLAQHQKSHSAENTYESTNCDKHFNEKPNLALPEETFVSGPQYQHTKCMKSFRQSLYPALSEKSHDEDSERCSDDGDNFFSFSKFKPLQCPDCDMTFPCFSELISHQNIHTEERPHKCKTCEESFALDSELACHQKSHMLAEPFKCTVCGKTFKSNLHLITHKRTHIKNTT

SEQ ID NO: 16287 - protein, 904 aa, Homo sapiens
MAAAGGAEGRRAALEAAAAAAPERGGGSCVLCCGDLEATALGRCDHPVCYRCSTKMRVLCEQRYCAVCREELRQVVFGKKLPAFATIPIHQLQHEKKYDIYFADGKVYALYRQLLQHECPRCPELPPFSLFGDLEQHMRRQHELFCCRLCLQHLQIFTYERKWYSRKDLARHRMQGDPDDTSHRGHPLCKFCDERYLDNDELLKHLRRDHYFCHFCDSDGAQDYYSDYAYLREHFREKHFLCEEGRCSTEQFTHAFRTEIDLKAHRTACHSRSRAEARQNRHIDLQFSYAPRHSRRNEGVVGGEDYEEVDRYSRQGRVARAGTRGAQQSRRGSWRYKREEEDREVAAAVRASVAAQQQEEARRSEDQEEGGRPKKEEAAARGPEDPRGPRRSPRTQGEGPGPKETSTNGPVSQEAFSVTGPAAPGCVGVPGALPPPSPKLKDEDFPSLSASTSSSCSTAATPGPVGLALPYAIPARGRSAFQEEDFPALVSSVPKPGTAPTSLVSAWNSSSSSKKVAQPPLSAQATGSGQPTRKAGKGSRGGRKGGPPFTQEEEEDGGPALQELLSTRPTGSVSSTLGLASIQPSKVGKKKKVGSEKPGTTLPQPPPATCPPGALQAPEAPASRAEGPVAVVVNGHTEGPAPARSAPKEPPGLPRPLGSFPCPTPQEDFPALGGPCPPRMPPPPGFSAVVLLKGTPPPPPPGLVPPISKPPPGFSGLLPSPHPACVPSPATTTTTKAPRLLPAPRAYLVPENFRERNLQLIQSIRDFLQSDEARFSEFKSHSGEFRQGLISAAQYYKSCRDLLGENFQKVFNELLVLLPDTAKQQELLSAHTDFCNREKPLSTKSKKNKKSAWQATTQQAGLDCRVCPTCQQVLAHGDASSHQALHAARDDDFPSLQAIARIIT

SEQ ID NO: 16288 - protein, 588 aa, Homo sapiens
MAAPALALVSFEDVVVTFTGEEWGHLDLAQRTLYQEVMLETCRLLVSLGHPVPKPELIYLLEHGQELWTVKRGLSQSTCAGEKAKPKITEPTASQLAFSEESSFQELLAQRSSRDSRLGQARDEEKLIKIQEGNLRPGTNPHKEICPEKLSYKHDDLEPDDSLGLRVLQERVTPQDALHECDSQGPGKDPMTDARNNPYTCTECGKGFSKKWALVRHQQIHAGVKPYECNECGKACRYMADVIRHMRLHTGEKPYKCIECGKAFKRRFHLTEHQRIHTGDKPYECKECGKAFTHRSSFIQHNMTHTREKPFLCKECGKAFYYSSSFAQHMRIHTGKKLYECGECGKAFTHRSTFIQHNVTHTGEKPFLCKECGKTFCLNSSFTQHMRIHTGEKPYECGECGKAFTHRSTFIRHKRTHTGEKPFECKECGKAFCDSSSLIQHMRIHTGEKPYECSECGKAFTHHSVFIRHNRTHSGQKPLECKECAKAFYYSSSFTRHMRIHTGEKPYVCRECGKAFTQPANFVRHNRIHTGEKPFECKECEKAFCDNFALTQHMRTHTGEKPFECNECGKTFSHSSSFTHHRKIHTRV

SEQ ID NO: 16289 - protein, 722 aa, Homo sapiens
MMKEVLSTGQGNTEVIHTGTLQRYQSYHIGDFCFQEIEKEIHDIEFQCQEDERNGHEAPMTKIKKLTGSTDQHDHRHAGNKPIKDQLGSSFYSHLPELHIIQIKGKIGNQFEKSTSDAPSVSTSQRISPRPQIHISNNYGNNSPNSSLLPQKQEVYMREKSFQCNESGKAFNCSSLLRKHQIPHLGDKQYKCDVCGKLFNHKQYLTCHCRCHTGEKPYKCNECGKSFSQVSSLTCHRRLHTAVKSHKCNECGKIFGQNSALVIHKAIHTGEKPYKCNECDKAFNQQSNLARHRRIHTGEKPYKCEECDKVFSRKSTLESHKRIHTGEKPYKCKVCDTAFTWNSQLARHKRIHTGEKTYKCNECGKTFSHKSSLVCHHRLHGGEKSYKCKVCDKAFAWNSHLVRHTRIHSGGKPYKCNECGKTFGQNSDLLIHKSIHTGEQPYKYEECEKVFSCGSTLETHKIIHTGEKPYKCKVCDKAFACHSYLAKHTRIHSGEKPYKCNECSKTFRLRSYLASHRRVHSGEKPYKCNECSKTFSQRSYLHCHRRLHSGEKPYKCNECGKTFSHKPSLVHHRRLHTGEKSYKCTVCDKAFVRNSYLARHTRIHTAEKPYKCNECGKAFNQQSQLSLHHRIHAGEKLYKCETCDKVFSRKSHLKRHRRIHPGKKPYKCKVCDKTFGSDSHLKQHTGLHTGEKPYKCNECGKAFSKQSTLIHHQAVHGVGKLD

SEQ ID NO: 16290 - protein, 641 aa, Homo sapiens
MIQSQISFEDVAVDFTLEEWQLLNPTQKNLYRDVMLENYSNLVFLEVWLDNPKMWLRDNQDNLKSMERGHKYDVFGKIFNSSINIVHVGLRSHKCGTGEKSLKCPFDLLIPKNNCERKKIDELNKKLLFCIKPGRTHGGIKYCDCSTCRKSSNEEPWLTANHITHTGVYLCMECGRFFNKKSQLVIHQRTHTGEKPYQCSECGKAFSQKSLLTVHQRTHSGEKPHGCSECQKAFSRKSLLILHQRIHTGEKPYGCSECGKAFSRKSQLKRHQITHTIEKPYSCSECGKAFSQKLKLITHQRAHTGEKPYPCSHCGKAFFWKSQLITHQRTHTGKKPYGCGECQKAFSRNSLLIRHQRIHTGEKPYECNECGEAFIRKPQLIKHQITHTGEKNYRCSDCEEAFFKKSELIRHQKIHLGEKPYGCIQCGKTFFGKSQLLTHHRTHTGEKPYECSECGKAFTQKSSLISHQRTHTGEKPYECSECRKTFSEKSSLIHHQRTHTGEKPFECSECRKAFAWKPQLLRHQRIHTGEKPYECSECGKAFVQKVQLIKHQRNHTGEKTYGCSDCAKAFFEKAQLIIHQRIHTGERPYKCGECGKSFTRKSHLMRHQRIHTGDKYYGCNECGTTFNRKSQLMIHQRNHII

SEQ ID NO: 16291 - protein, 792 aa, Homo sapiens
MAAINPWASWGALTDQSWGMTAVDPWASWALCPQYPAWHVEGSLEEGRRATGLPAAQVQEPVTFKDVAVDFTQEEWGQLDLVQRTLYRDVMLETYGHLLSVGNQIAKPEVISLLEQGEEPWSVEQACPQRTCPEWVRNLESKALIPAQSIFEEEQSHGMKLERYIWDDPWFSRLEVLGCKDQLEMYHMNQSTAMRQMVFMQKQVLSQRSSEFCGLGAEFSQNLNFVPSQRVSQIEHFYKPDTHAQSWRCDSAIMYADKVTCENNDYDKTVYQSIQPIYPARIQTGDNLFKCTDAVKSFNHIIHFGDHKGIHTGEKLYEYKECHQIFNQSPSFNEHPRLHVGENQYNYKEYENIFYFSSFMEHQKIGTVEKAYKYNEWEKVFGYDSFLTQHTSTYTAEKPYDYNECGTSFIWSSYLIQHKKTHTGEKPYECDKCGKVFRNRSALTKHERTHTGIKPYECNKCGKAFSWNSHLIVHKRIHTGEKPYVCNECGKSFNWNSHLIGHQRTHTGEKPFECTECGKSFSWSSHLIAHMRMHTGEKPFKCDECEKAFRDYSALSKHERTHSGAKPYKCTECGKSFSWSSHLIAHQRTHTGEKPYNCQECGKAFRERSALTKHEIIHSGIKPYECNKCGKSCSQMAHLVRHQRTHTGEKPYECNKCGKSFSQSCHLVAHRRIHTGEKPYKCNQCERSFNCSSHLIAHRRTHTGEKPYRCNECGKAFNESSSLIVHLRNHTGEKPYKCNHCEKAFCKNSSLIIHQRMHSGEKRFICSECGKAFSGHSALLQHQRNHSEEKLN

SEQ ID NO: 16292 - protein, 696 aa, Homo sapiens
MSYGSITFGDVAIDFSHQEWEYLSLVQKTLYQEVMMENYDNLVSLAGHSVSKPDLITLLEQGKEPWMIVREETRGECTDLDSRCEIISDGKMQLYRKHSCVTLHQRIHNGQKPYECKQCQKSFSHLTELMVHQTIHTSEEPDQCEKFRKAFSHLTDLRKHQKINAREKPYECEECGKVFSYPANLAQHGKVHVEKPYECKECGEAFRTSRQLTVHHRFHYGEKPYECKECGKAFSVYGRLSRHQSIHTGEKPFECNKCGKSFRLKAGLKVHQSIHTGEKPHECKECGKAFRQFSHLVGHKRIHTGEKPYECKECGKGFTCRYQLTMHQRIYSGEKHYECKENGEAFSSGHQLTAPHTFESVEKPYKCEECGKAFSVHGRLTRHQGIHSGKKPYECNKCGKSFRLNSSLKIHQNIHTGEKPYKCKECGKAFSQRAHLAHHNRIHTGYKPFECKECGKSFRCASYLVIHERIHTGEKPYVCQECGKGFSYSHKLTIHRRVHTGEKPYECKECGKAFSVSGQLTQHLSIHSGKKPFECNKCGKSFRFISVLKAHQNIHSAEKPYECKECGKAFRHATSLIYHDRTHAGEKSYECKECGETFSHASHLIIHERIHTSDKPYECKRCGKAFHCASYLVRHESVHADGNPYMCEECGKAFNSSHELSIHHRVHTGEKPFKCNKCRRSFRLRSILEVHQRIHI

SEQ ID NO: 16293 - protein, 1512 aa, Homo sapiens
MSVNISTAGKGVDPNTVDTYDSGDDWEIGVGNLIIDLDADLEKDRQKFEMNNSTTTTSSSNSKDCGGPASSGAGATAALADGLKFASVQASAPQGNSHKETSKSKVKRSKTSKDANKSLPSAALYGIPEISSTGKRQEVQGRPGEATGMNSALGQSVSSGGSGNPNSNSTSTSTSAATAGAGSCGKSKEEKPGKSQSSRGAKRDKDAGKSRKDKHDLLQGHQNGSGSQAPSGGHLYGFGAKSNGGGASPFHCGGTGSGSVAAAGEVSKSAPDSGLMGNSMLVKKEEEEEESHRRIKKLKTEKVDPLFTVPAPPPPISSSLTPQILPSYFSPSSSNIAAPVEQLLVRTRSVGVNTCEVGVVTEPECLGPCEPGTSVNLEGIVWHETEEGVLVVNVTWRNKTYVGTLLDCTKHDWAPPRFCESPTSDLEMRGGRGRGKRARSAAAAPGSEASFTESRGLQNKNRGGANGKGRRGSLNASGRRTPPNCAAEDIKASPSSTNKRKNKPPMELDLNSSSEDNKPGKRVRTNSRSTPTTPQGKPETTFLDQGCSSPVLIDCPHPNCNKKYKHINGLRYHQAHAHLDPENKLEFEPDSEDKISDCEEGLSNVALECSEPSTSVSAYDQLKAPASPGAGNPPGTPKGKRELMSNGPGSIIGAKAGKNSGKKKGLNNELNNLPVISNMTAALDSCSAADGSLAAEMPKLEAEGLIDKKNLGDKEKGKKATNCKTDKNLSKLKSARPIAPAPAPTPPQLIAIPTATFTTTTTGTIPGLPSLTTTVVQATPKSPPLKPIQPKPTIMGEPITVNPALVSLKDKKKKEKRKLKDKEGKETGSPKMDAKLGKLEDSKGASKDLPGHFLKDHLNKNEGLANGLSESQESRMASIKAEADKVYTFTDNAPSPSIGSASRLECSTLVNGQAPMAPLHVLTQNGAESSAAKTSSPAYSDISDAADDGGSDSRSEGMRSKASSPSDIISSKDSVVKGHSSTTAQSSQLKESHSPYYHSYDPYYSPSYMHPGQVGAPAAGNSGSTQGMKIKKESEEDAEKKDKAEQLDSKKVDHNSASLQPQHQSVITQRHPALAQSLYYGQYAYGLYMDQKSLMATSPAYRQQYEKYYEDQRLAEQKMAQTGRGDCERKSELPLKELGKEETKQKNMPSATISKAPSTPEPNKNHSKLGPSVPNKTEETGKSQLLSNHQQQLQADSFKAKQMENHQLIKEAVEMKSVMDSMKQTGVDPTSRFKQDPDSRTWHHYVYQPKYLDQQKSEELDREKKLKEDSPRKTPNKESGVPSLPVSLTSIKEEPKEAKHPDSQSMEESKLKNDDRKTPVNWKDSRGTRVAVSSPMSQHQSYIQYLHAYPYPQMYDPSHPAYRAVSPVLMHSYPGAYLSPGFHYPVYGKMSGREETEKVNTSPSVNTKTTTESKALDLLQQHANQYRSKSPAPVEKATAEREREAERERDRHSPFGQRHLHTHHHTHVGMGYPLIPGQYDPFQGLTSAALVASQQVAAQASASGMFPGQRRE

SEQ ID NO: 16294 - protein, 1411 aa, Homo sapiens
MSLSSGASGGKGVDANPVETYDSGDEWDIGVGNLIIDLDADLEKDQQKLEMSGSKEVGIPAPNAVATLPDNIKFVTPVPGPQGKEGKSKSKRSKSGKDTSKPTPGTSLFTPSEGAASKKEVQGRSGDGANAGGLVAAIAPKGSEKAAKASRSVAGSKKEKENSSSKSKKERSEGVGTCSEKDPGVLQPVPLGGRGGQYDGSAGVDTGAVEPLGSIAIEPGAALNPLGTKPEPEEGENECRLLKKVKSEKMESPVSTPAVLPIHLLVPVVNNDISSPCEQIMVRTRSVGVNTCDVALATEPECLGPCEPGTSVNLEGIVWQETEDGMLVVNVTWRNKTYVGTLLDCTRHDWAPPRFCDSPTSDLEMRNGRGRGKRMRPNSNTPVNETATASDSKGTSNSSKTRAGANSKGRRGSQNSSEHRPPASSTSEDVKASPSSANKRKNKPLSDMELNSSSEDSKGSKRVRTNSMGSATGPLPGTKVEPTVLDRNCPSPVLIDCPHPNCNKKYKHINGLKYHQAHAHTDDDSKPEADGDSEYGEEPILHADLGSCNGASVSQKGSLSPARSATPKVRLVEPHSPSPSSKFSTKGLCKKKLSGEGDTDLGALSNDGSDDGPSVMDETSNDAFDSLERKCMEKEKCKKPSSLKPEKIPSKSLKSARPIAPAIPPQQIYTFQTATFTAASPGSSSGLTATVAQAMPNSPQLKPIQPKPTVMGEPFTVNPALTPAKDKKKKDKKKKESSKELESPLTPGKVCRAEEGKSPFRESSGDGMKMEGLLNGSSDPHQSRLASIKAEADKIYSFTDNAPSPSIGGSSRLENTTPTQPLTPLHVVTQNGAEASSVKTNSPAYSDISDAGEDGEGKVDSVKSKDAEQLVKEGAKKTLFPPQPQSKDSPYYQGFESYYSPSYAQSSPGALNPSSQAGVESQALKTKRDEEPESIEGKVKNDICEEKKPELSSSSQQPSVIQQRPNMYMQSLYYNQYAYVPPYGYSDQSYHTHLLSTNTAYRQQYEEQQKRQSLEQQQRGVDKKAEMGLKEREAALKEEWKQKPSIPPTLTKAPSLTDLVKSGPGKAKEPGADPAKSVIIPKLDDSSKLPGQAPEGLKVKLSDASHLSKEASEAKTGAECGRQAEMDPILWYRQEAEPRMWTYVYPAKYSDIKSEDERWKEERDRKLKEERSRSKDSVPKEDGKESTSSDCKLPTSEESRLGSKEPRPSVHVPVSSPLTQHQSYIPYMHGYSYSQSYDPNHPSYRSMPAVMMQNYPGSYLPSSYSFSPYGSKVSGGEDADKARASPSVTCKSSSESKALDILQQHASHYKSKSPTISDKTSQERDRGGCGVVGGGGSCSSVGGASGGERSVDRPRTSPSQRLMSTHHHHHHLGYSLLPAQYNLPYAAGLSSTAIVASQQGSTPSLYPPPRR

SEQ ID NO: 16295 - protein, 462 aa, Homo sapiens
MLCDEEAQKRKAKESGMALPQGRLTFMDVAIEFSQEEWKSLDPGQRALYRDVMLENYRNLVFLGICLPDLSIISMLKQRREPLILQSQVKIVKNTDGRECVRSVNTGRSCVLGSNAENKPIKNQLGLTLEAHLSELQLFQAGRKIYRSNQVEKFTNHRSSVSPLQKISSSFTTHIFNKYRNDLIDFPLLPQEEKAYIRGKSYEYECSEDGEVFRVRASLTNHQVIHTAEKPYKCTECGKVFSRNSHLVEHWRIHTGQKPYKCSECDKVFNRNSNLARHQRIHTGEKPHKCNECGKAFRECSGLTTHLVIHTGEKPYKCNECGKNFRHKFSLTNHQRSHTAEKPYKCNECGKVFSLLSYLARHQIIHSTEKPYKCNECGRAFHKRPGLMAHLLIHTGEKPYKCNECDKVFGRKLYLTNHQRIHTGERPYKCNACGKVFNQNPHLSRHRKIHAGENSLRTLQME

SEQ ID NO: 16296 - protein, 705 aa, Homo sapiens
MLREEAAQKRKGKEPGMALPQGRLTFRDVAIEFSLAEWKCLNPSQRALYREVMLENYRNLEAVDISSKCMMKEVLSTGQGNTEVIHTGTLQRHESHHIGDFCFQEIEKEIHDIEFQCQEDERNGLEAPMTKIKKLTGSTDQHDHRHAGNKPIKDQLGSSFYSHLPELHIFQIKGEIGNQLEKSTNDAPSVSTFQRISCRPQTQISNNYGNNPLNSSLLPQKQEVHMREKSFQCNKSGKAFNCSSLLRKHQIPHLGDKQYKCDVCGKLFNHEQYLACHDRCHTVEKPYKCKECGKTFSQESSLTCHRRLHTGVKRYNCNECGKIFGQNSALLIDKAIDTGENPYKCNECDKAFNQQSQLSHHRIHTGEKPYKCEECDKVFSRKSTIETHKRIHTGEKPYRCKVCDTAFTWHSQLARHRRIHTAKKTYKCNECGKTFSHKSSLVCHHRLHGGEKSYKCKVCDKAFVWSSQLAKHTRIDCGEKPYKCNECGKTFGQNSDLLIHKSIHTGEQPYKCDECEKVFSRKSSLETHKIGHTGEKPYKCKVCDKAFACHSYLAKHTRIHSGEKPYKCNECSKTFSHRSYLVCHHRVHSGEKPYKCNECSKTFSRRSSLHCHRRLHSGEKPYKCNECGNTFRHCSSLIYHRRLHTGEKSYKCTICDKAFVRNSLLSRHTRIHTAEKPYKCNECGKAFNQQSHLSRHHRIHTGEKP

SEQ ID NO: 16297 - protein, 617 aa, Homo sapiens
MIKSQESLTLEDVAVEFTWEEWQLLGPAQKDLYRDVMLENYSNLVSVGYQASKPDALFKLEQGEPWTVENEIHSQICPEIKKVDNHLQMHSQKQRCLKRVEQCHKHNAFGNIIHQRKSDFPLRQNHDTFDLHGKILKSNLSLVNQNKRYEIKNSVGVNGDGKSFLHAKHEQFHNEMNFPEGGNSVNTNSQFIKHQRTQNIDKPHVCTECGKAFLKKSRLIYHQRVHTGEKPHGCSICGKAFSRKSGLTEHQRNHTGEKPYECTECDKAFRWKSQLNAHQKIHTGEKSYICSDCGKGFIKKSRLINHQRVHTGEKPHGCSLCGKAFSKRSRLTEHQRTHTGEKPYECTECDKAFRWKSQLNAHQKAHTGEKSYICRDCGKGFIQKGNLIVHQRIHTGEKPYICNECGKGFIQKGNLLIHRRTHTGEKPYVCNECGKGFSQKTCLISHQRFHTGKTPFVCTECGKSCSHKSGLINHQRIHTGEKPYTCSDCGKAFRDKSCLNRHRRTHTGERPYGCSDCGKAFSHLSCLVYHKGMLHAREKCVGSVKLENPCSESHSLSHTRDLIQDKDSVNMVTLQMPSVAAQTSLTNSAFQAESKVAIVSQPVARSSVSADSRICTE

SEQ ID NO: 16298 - protein, 585 aa, Homo sapiens
MIKTQESLTLEDVAVEFSWEEWQLLDTAQKNLYRDVMVENYNHLVSLGYQTSKPDVLSKLAHGQEPWTTDAKIQNKNCPGIGKVDSHLQEHSPNQRLLKSVQQCNGQNTLRNIVHLSKTHFPIVQNHDTFDLYRKNLKSSLSLINQKRRHGINNPVEFIGGEKTLLHGKHERTHTKTRFSENAKCIHTKFQVFKHQRTQKIEKPHACIECEQTFLRKSQLIYHENICIQENPGSGQCEKLSRSVLFTKHLKTNTTDKICIPNEYRKGSTVKSSLITHQQTHTEEKSYMCSECGKGFTMKRYLIAHQRTHSGEKPYVCKECGKGFTVKSNLIVHQRTHTGEKPYICSECGKGFTMKRYLVVHQRTHTGEKPYMCSECGKGFTVKSNLIVHQRSHTGEKSYICSECGKGFTVKRTLVIHQRTHTGEKSYICNECGKGFTTKRTLIIHQRTHTGEKPYECNECGKAFSQKICLIQHERCHTGKTPFVCTECGKSYSHKYGLITHQRIHTGEKPYECNECGKAFTTKSVLNVHQRTHTGERPYGCSDCEKAFSHLSNLVKHKKMHTREMGRISQVENSCNGESQLLPYK

SEQ ID NO: 16299 - protein, 731 aa, Homo sapiens
MMQAQESLTLEDVAVDFTWEEWQFLSPAQKDLYRDVMLENYSNLVAVGYQASKPDALSKLERGEETCTTEDEIYSRICSEIRKIDDPLQHHLQNQSIQKSVKQCHEQNMFGNIVNQNKGHFLLKQDCDTFDLHEKPLKSNLSFENQKRSSGLKNSAEFNRDGKSLFHANHKQFYTEMKFPAIAKPINKSQFIKQQRTHNIENAHVCSECGKAFLKLSQFIDHQRVHTGEKPHVCSMCGKAFSRKSRLMDHQRTHTELKHYECTECDKTFLKKSQLNIHQKTHMGGKPYTCSQCGKAFIKKCRLIYHQRTHTGEKPHGCSVCGKAFSTKFSLTTHQKTHTGEKPYICSECGKGFIEKRRLTAHHRTHTGEKPFICNKCGKGFTLKNSLITHQQTHTGEKLYTCSECGKGFSMKHCLMVHQRTHTGEKPYKCNECGKGFALKSPLIRHQRTHTGEKPYVCTECRKGFTMKSDLIVHQRTHTAEKPYICNDCGKGFTVKSRLIVHQRTHTGEKPYVCGECGKGFPAKIRLMGHQRTHTGEKPYICNECGKGFTEKSHLNVHRRTHTGEKPYVCSECGKGLTGKSMLIAHQRTHTGEKPYICNECGKGFTMKSTLSIHQQTHTGEKPYKCNECDKTFRKKTCLIQHQRFHTGKTSFACTECGKFSLRKNDLITHQRIHTGEKPYKCSDCGKAFTTKSGLNVHQRKHTGERPYGCSDCGKAFAHLSILVKHRRIHR

SEQ ID NO: 16300 - protein, 781 aa, Homo sapiens
MATQGHLTFKDVAIEFSQEEWKCLEPVQKALYKDVMLENYRNLVFLGISPKCVIKELPPTENSNTGERFQTVALERHQSYDIENLYFREIQKHLHDLEFQWKDGETNDKEVPVPHENNLTGKRDQHSQGDVENNHIENQLTSNFESRLAELQKVQTEGRLYECNETEKTGNNGCLVSPHIREKTYVCNECGKAFKASSSLINHQRIHTTEKPYKCNECGKAFHRASLLTVHKVVHTRGKSYQCDVCGKIFRKNSYFVRHQRSHTGQKPYICNECGKSFSKSSHLAVHQRIHTGEKPYKCNLCGKSFSQRVHLRLHQTVHTGERPFKCNECGKTFKRSSNLTVHQVIHAGKKPYKCDVCGKAFRHRSNLVCHRRIHSGEKQYKCNECGKVFSKRSSLAVHRRIHTVEKPCKCNECGKVFSKRSSLAVHQRIHTGQKTYKCNKCGKVYSKHSHLAVHWRIHTGEKAYKCNECGKVFSIHSRLAAHQRIHTGEKPYKCNECGKVFSQHSRLAVHRRIHTGEKPYKCKECGKVFSDRSAFARHRRIHTGEKPYKCKECGKVFSQCSRLTVHRRIHSGEKPYKCNECGKVYSQYSHLVGHRRVHTGEKPYKCHECGKAFNQGSTLNRHQRIHTGEKPYKCNQCGNSFSQRVHLRLHQTVHTGDRPYKCNECGKTFKRSSNLTAHQIIHAGKKPYKCDECGKVFRHSSHLVSHQRIHTGEKRYKCIECGKAFGRLFSLSKHQRIHSGKKPYKCNECGKSFICRSGLTKHRIRHTGESLTTKLNVTRP

SEQ ID NO: 16301 - protein, 954 aa, Homo sapiens
MNQPGGAAAPQADGASAAGRKSTASRERLKRSQKSTKVEGPEPVPAEASLSAEQGTMTEVKVKTELPDDYIQEVIWQGEAKEEKKAVSKDGTSDVPAEICVVIGGVRNQQTLDGKAPEGSPHGGSVRSRYSGTWIFDQALRYASGSYECGICGKKYKYYNCFQTHVRAHRDTEATSGEGASQSNNFRYTCDICGKKYKYYSCFQEHRDLHAVDVFSVEGAPENRADPFDQGVVATDEVKEEPPEPFQKIGPKTGNYTCEFCGKQYKYYTPYQEHVALHAPISTAPGWEPPDDPDTGSECSHPEVSPSPRFVAAKTQTNQSGKKAPASVVRCATLLHRTPPATQTQTFRTPNSGSPASKATAAESAFSRRVEGKAQNHFEETNSSSQNSSEPYTCGACGIQFQFYNNLLEHMQSHAADNENNIASNQSRSPPAVVEEKWKPQAQRNSANNTTTSGLTPNSMIPEKERQNIAERLLRVMCADLGALSVVSGKEFLKLAQTLVDSGARYGAFSVTEILGNFNTLALKHLPRMYNQVKVKVTCALGSNACLGIGVTCHSQSVGPDSCYILTAYQAEGNHIKSYVLGVKGADIRDSGDLVHHWVQNVLSEFVMSEIRTVYVTDCRVSTSAFSKAGMCLRCSACALNSVVQSVLSKRTLQARSMHEVIELLNVCEDLAGSTGLAKETFGSLEETSPPPCWNSVTDSLLLVHERYEQICEFYSRAKKMNLIQSLNKHLLSNLAAILTPVKQAVIELSNESQPTLQLVLPTYVRLEKLFTAKANDAGTVSKLCHLFLEALKENFKVHPAHKVAMILDPQQKLRPVPPYQHEEIIGKVCELINEVKESWAEEADFEPAAKKPRSAAVENPAAQEDDRLGKNEVYDYLQEPLFQATPDLFQYWSCVTQKHTKLAKLAFWLLAVPAVGARSGCVNMCEQALLIKRRRLLSPEDMNKLMFLKSNML

SEQ ID NO: 16302 - protein, 560 aa, Homo sapiens
MGQPAPYAEGPIQGGDAGELCKCDFLVSISIPQTRSDIPAGARRSSMGPRSLDTCWGRGPERHVHRLECNGVIFTHRNLCLPGGKTKTENEEKTAQLNISKESESHRLIVEGLLMDVPQHPDFKDRLEKSQLHDTGNKTKIGDCTDLTVQDHESSTTEREEIARKLEESSVSTHLITKQGFAKEQVFYKCGECGSYYNPHSDFHLHQRVHTNEKPYTCKECGKTFRYNSKLSRHQKIHTGEKPYSCEECGQAFSQNSHLLQHQKLHGGQRPYECTDCGKTFSYNSKLIRHQRIHTGEKPFKCKECGKAFSCSYDCIIHERIHNGEKPYECKECGKSLSSNSVLIQHQRIHTGEKPYECKECGKAFHRSSVFLQHQRFHTGEQLYKCNECWKTFSCSSRFIVHQRIHNGEKPYECQECGKTFSQKITLVQHQRVHTGEKPYECKECGKAFRWNASFIQHQKWHTRKKLINGTGLSAVKPYCPCAILSPLPPQHTCSALAPPGPPLSSSHAVVLPPSVPFFLLLPSSEKANPSPVQIAHFFQDLAFPGKSSLQSPNPLSHSL

SEQ ID NO: 16303 - protein, 422 aa, Homo sapiens
MFQTAWRQEPVTFEDVAVYFTQNEWASLDSVQRALYREVMLENYANVASLAFPFTTPVLVSQLEQGELPWGLDPWEPMGREALRGICPGDEARTEKEGLTPKDHVSKETESFRLMVGGLPGNVSQHLDFGSSLEQPQGHWIIKTKSKRRHFTDTSARHHEAYEVKNGEKFEKLGKNISVSTQLTTNQTNPSGQISYECGQCGRYFIQMADFHRHEKCHTGEKSFECKECGKYFRYNSLLIRHQIIHTGKKPFKCKECGKGLSSDTALIQHQRIHTGEKPYECKECGKAFSSSSVFLQHQRFHTGEKLYECNECWKTFSCSSSFTVHQRMHTGEKPYECKECGKRLSSNTALTQHQRIHTGEKPFECKECGKAFNQKITLIQHQRVHTGEKPYECKVCGKTFSWCGRFILHQKLHTQKTPVQA

SEQ ID NO: 16304 - protein, 439 aa, Homo sapiens
MLQTTWPQESVTFEDVAVYFTQNQWASLDPAQRALYGEVMLENYANVASLVAFPFPKPALISHLERGEAPWGPDPWDTEILRGISQGGESWIKNEGLVIKQEASEETELHRMPVGGLLRNVSQHFDFKRKALKQTFNLNPNLILRGGMKFYECKECGKIFRYNSKLIRHQMSHTGEKPFKCKECGKAFKSSYDCIVHEKNHIGEGPYECKECGKGLSSNTALTQHQRIHTGEKPYECKECGKAFRRSAAYLQHQRLHTGEKLYKCKECWKAFGCRSLFIVHQRIHTGEKPYQCKECGKAFTQKIASIQHQRVHTGEKPYECKVCGKAFKWYGSFVQHQKLHPVEKKPVKVLGPSLVSPQCSSPAIPPVLLQGSCSASAVAVPSLTFPHAVLIPTSGNFFMLLPTSGIPSSSAQIVRVFQGLTPTVKPSPVILTPSSHSS

SEQ ID NO: 16305 - protein, 477 aa, Homo sapiens
MATYTCITCRVAFRDADMQRAHYKTDWHRYNLRRKVASMAPVTAEGFQERVRAQRAVAEEESKGSATYCTVCSKKFASFNAYENHLKSRRHVELEKKAVQAVNRKVEMMNEKNLEKGLGVDSVDKDAMNAAIQQAIKAQPSMSPKKAPPAPAKEARNVVAVGTGGRGTHDRDPSEKPPRLQWFEQQAKKLAKQQEEDSEEEEEDLDGDDWEDIDSDEELECEDTEAMDDVVEQDAEEEEAEEGPPLGAIPITDCLFCSHHSSSLMKNVAHMTKDHSFFIPDIEYLSDIKGLIKYLGEKVGVGKICLWCNEKGKSFYSTEAVQAHMNDKSHCKLFTDGDAALEFADFYDFRSSYPDHKEGEDPNKAEELPSEKNLEYDDETMELILPSGARVGHRSLMRYYKQRFGLSRAVAVAKNRKAVGRVLQQYRALGWTGSTGAALMRERDMQYVQRMKSKWMLKTGMKNNATKQMHFRVQVRF

SEQ ID NO: 16306 - protein, 536 aa, Homo sapiens
MILLSFVSDSNVGTGEKKVTEAWISEDENSHRTTSDRLTVMELPSPESEEVHEPRLGELLGNPEGQSLGSSPSQDRGCKQVTVTHWKIQTGETAQVCTKSGRNHILNSDLLLLQRELIEGEANPCNICGKTFTFNSDLVRHRISHAGEKPYTCDQCGKGFGQSSHLMEHQRIHTGERLYVCNVCGKDFIHYSGLIEHQRVHSGEKPFKCAQCGKAFCHSSDLIRHQRVHTRERPFECKECGKGFSQSSLLIRHQRIHTGERPYECNECGKSFIRSSSLIRHYQIHTEVKQYECKECGKAFRHRSDLIEHQRIHTGERPFECNECGKAFIRSSKLIQHQRIHTGERPYVCNECGKRFSQTSNFTQHQRIHTGEKLYECNECGKAFFLSSYLIRHQKIHTGERVYECKECGKAFLQKAHLTEHQKIHSGDRPFECKDCGKAFIQSSKLLLHQIIHTGEKPYVCSYCGKGFIQRSNFLQHQKIHTEEKLYECSQYGRDFNSTTNVKNNQRVHQEGLSLSKAPIHLGERSVDKGEHTGNL

SEQ ID NO: 16307 - protein, 865 aa, Homo sapiens
MSLQDSTLSREGKPEGEIMAAVFFSVGRLSPEVTQPDEDLHLQAEETQLVKESVTFKDVAIDFTLEEWRLMDPTQRNLHKDVMLENYRNLVSLGLAVSKPDMISHLENGKGPWVTVREISRIPYPDMEPKPATKKATRTKAISEDLSQEAILEKLTENGLWDSRMEGLWKWNDRILRLQNNQENHLSQRIIPLKKTPTSQRGFRFESILIPEPGIATEELHSRCQTQEENFTENLNLITDTHLGKIICKEMKGSKAIRQTSELTLGKKSNNKEKPYKCSTCEKAFHYRSLLIQHQRTHTKEKPYECNECGKTFSQPSYLSQHKKIHTGEKPYKCNECGKAFIASSSLMVHQRIHTKEKPYQCNVCGKSFSQCARLNQHQRIQTGEKPYKCSECGKAFSDKSKLARHQETHNGEKPYKCDDCGKAFRNKSYLSVHQKTHTEEKPYQCNECGKSFKNTTIFNVHQRIHTGEKPFRCNECGKAYRSNSSLIVHIRTHTGEKPYECNECGKAFNRIANFTEHQRIHTGEKPYKCNECGKAFINYSCLTVHHRMHTGEKPYKCTECGKAFMRSSSLIIHQRIHTEEKPYLCNECGESFRIKSHLTVHQRIHTGEKPYKCTDCERAFTKMVNLKEHQKIHTGVKPYKCYDCGKSFRTKSYLIVHQRTHTGEKPYKCNECEKAFTNTSQLTVHQRRHTGEKPYKCNECGKVFTSNSGFNTHQRTHTGEKPFKCNDCGKAFSQMVHVTEHQKIHSGEKPYKCDVCGKAFRRGSYLTVHWRTHTGEKPYTCKECGKGCITLSQLTLHQRIHTGERPYKCEECGKAFRTNSDFTVHLRMHTGEKPYKCNECGKAFRSSSSLTVHQRIHQRETQLI

SEQ ID NO: 16308 - protein, 306 aa, Homo sapiens
MGERLLESKKDHQHGEILTQVPDDMLKKKTPRVKSCGEVSVGHASLNRHHRADTGHKPYEYQEYGQKPYKCTYCKKAFSDLPYFRTHEWAHTGGKPYDCEECGKSFISRSSIRRHRIMHSGDGPYKCNFCGKALMCLSLYLIHKRTHTGEKPYECKQCGKAFSHSGSLRIHERTHTGEKPYECSECGKAFHSSTCLHAHKITHTGEKPYECKQCGKAFVSFNSVRYHERTHTGEKPYECKQCGKAFRSASHLRTHGRTHTGEKPYECKQCGKAFGCASSVKIHERTHTGEKPCSSNTSKGQGEKIA

SEQ ID NO: 16309 - protein, 528 aa, Homo sapiens
MGPLQFRDVAIEFSLEEWHCLDTAQRNLYRNVMLENYSNLVFLGITVSKPDLITCLEQGRKPLTMKRNEMIAKPSVMCSHFAQDLWPEQSMKDSFQKVVLRRYEKCEHDNLQLKKGCISVDECKVHKEGYNELNQCLTTTPRKICQCDKYVKVLHQFPNSNGQKRGHTGKKPFKYIECGKAFKQFSTLTTHKKIHTGGKPYKCEECGKAFNHSCSLTRHKKIHTGEKPYKCEECGKAFKHSSTLTTHKRNHTGEKPYKCDKCGKAFMSSSTLSKHEIIHTEKKPYKCEECGKAFNRSSTLTTHKIIHTGEKPYKCEECDKAFKYSYTLTTHKRIHTEDKPYKCEECGKAFKYSSTLTTHKRIHTGEKPYKCEECGKAFKRSSDLTTHKIIHTGEKPYKCEECGKAFKYSSNLTTHKKIHTGERPYKCEECGKAFNQSSILTTHRRIHTGEKFYKCEECGKAFKCSSNLTTHKKIHTGERPYKCEECGKAFNQSSILTTHERIILERNSTNVKNVAKPSSGPHTLLHIR

SEQ ID NO: 16310 - protein, 461 aa, Homo sapiens
MDSVAFEDVAVNFTLEEWALLDPSQKNLYRDVMRETFRNLASVGKQWEDQNIEDPFKIPRRNISHIPERLCESKEGGQGEETFSQIPDGILNKKTPGVKPCESSVCGEVGMGPSSLNRHIRDHTGREPNEYQEYGKKSYTRNQCGRALSYHRSFPVRERTHPGGKPYDCKECGETFISLVSIRRHMLTHRGGVPYKCKVCGKAFDYPSLFRIHERSHTGEKPYECKQCGKAFSCSSYIRIHERTHTGDKPYECKQCGKAFSCSKYIRIHERTHTGEKPYECKQCGKAFRCASSVRSHERTHTGEKLFECKECGKALTCLASVRRHMIKHTGNGPYKCKVCGKAFDFPSSFRIHERTHTGEKPYDCKQCGKAFSCSSSFRKHERIHTGEKPYKCTKCGKAFSRSSYFRIHERTHTGEKPYECKQCGKAFSRSTYFRVHEKIHTGEKPYENPNPNASVVPVLS

SEQ ID NO: 16311 - protein, 1059 aa, Homo sapiens
MSGVMVGSHADMAPASTAEGAGEKPGPAAPAPAAQYECGECGKSFRWSSRLLHHQRTHTGERPYKCPDCPKAFKGSSALLYHQRGHTGERPYQCPDCPKAFKRSSLLQIHRSVHTGLRAFICGQCGLAFKWSSHYQYHLRQHTGERPYPCPDCPKAFKNSSSLRRHRHVHTGERPYTCGVCGKSFTQSTNLRQHQRVHTGERPFRCPLCPKTFTHSSNLLLHQRTHGAAPAPGTASAAPPPQSREPGKVFVCDAYLQRHLQPHSPPAPPAPPPPPPPVVPELFLAAAETTVELVYRCDGCEQGFSSEELLLEHQPCPGPDAAPQPQEAPAEAPKADQPPSPLPQPPPPAAAPAPGFACLPCGKSFRTVAGLSRHQHSHGAAGGQAFRCGSCDGSFPQLASLLAHQQCHVEEAAAGRPPPQAEAAEVTCPQEPLAPAAPVPPPPPSAPASAERPYKCAECGKSFKGSSGLRYHLRDHTGERPYQCGECGKAFKRSSLLAIHQRVHTGLRAFTCGQCGLTFKWSSHYQYHLRLHSGERPYACGECGKAFRNTSCLRRHRHVHTGERPHACGVCGKSFAQTSNLRQHQRVHTGERPFRCPLCPKTFTHSSNLLLHQRTHSAERPFTCPICGRGFVMAAYLQRHLRTHAPANTPPSTTAPAAGPQPPAPLAAARAPPATQDVHVLPHLQATLSLEVAGGTAQAPSLGPAAPNSQTFLLVQTAQGLQLIPSSVQPPTPPPPPAPPKLILLPSSSAGAGGGRARQGPRAVGKAGQGAGVVWLPGPGGLGVQGAASAGASGTGQSLIVLQNVGGGEAGPQEMSGVQLQPLRPAPEVTTVQLQPAQEVTTVQLQPAQEVTTVQLQPAQEVTTVQLQPVAGQLSNSSGGAVATEAPNLLVVQSGAAEELLTGPGPGEAGDGEASTGVVQDVLFETLQTDEGLQSVLVLSGADGEQTRLCVQEVETLPPGLTEPPATGPPGQKLLIIRSAPATELLDSSNTGGGTATLQLLAPPPSGPASGPAGLPGAPASQMVQVVPAGAGPGVMTPQGLPSIQIVQTLPAVQLVHTF

SEQ ID NO: 16312 - protein, 869 aa, Homo sapiens
MEPETALWGPDLQGPEQSPNDAHRGAESENEEESPRQESSGEEIIMGDPAQSPESKDSTEMSLERSSQDPSVPQNPPTPLGHSNPLDHQIPLDPPAPEVVPTPSDWTKACEASWQWGALTTWNSPPVVPANEPSLRELVQGRPAGAEKPYICNECGKSFSQWSKLLRHQRIHTGERPNTCSECGKSFTQSSHLVQHQRTHTGEKPYKCPDCGKCFSWSSNLVQHQRTHTGEKPYKCTECEKAFTQSTNLIKHQRSHTGEKPYKCGECRRAFYRSSDLIQHQATHTGEKPYKCPECGKRFGQNHNLLKHQKIHAGEKPYRCTECGKSFIQSSELTQHQRTHTGEKPYECLECGKSFGHSSTLIKHQRTHLREDPFKCPVCGKTFTLSATLLRHQRTHTGERPYKCPECGKSFSVSSNLINHQRIHRGERPYICADCGKSFIMSSTLIRHQRIHTGEKPYKCSDCGKSFIRSSHLIQHRRTHTGEKPYKCPECGKSFSQSSNLITHVRTHMDENLFVCSDCGKAFLEAHELEQHRVIHERGKTPARRAQGDSLLGLGDPSLLTPPPGAKPHKCLVCGKGFNDEGIFMQHQRIHIGENPYKNADGLIAHAAPKPPQLRSPRLPFRGNSYPGAAEGRAEAPGQPLKPPEGQEGFSQRRGLLSSKTYICSHCGESFLDRSVLLQHQLTHGNEKPFLFPDYRIGLGEGAGPSPFLSGKPFKCPECKQSFGLSSELLLHQKVHAGGKSSQKSPELGKSSSVLLEHLRSPLGARPYRCSDCRASFLDRVALTRHQETHTQEKPPNPEDPPPEAVTLSTDQEGEGETPTPTESSSHGEGQNPKTLVEEKPYLCPECGAGFTEVAALLLHRSCHPGVSL

SEQ ID NO: 16313 - protein, 485 aa, Homo sapiens
MNEYPKKRKRKTLHPSRYSDSSGISRIADGFNGIFSDHCYSVCSMRQPDLKYFDNKDDDSDTETSNDLPKFADGIKARNRNQNYLVPSPVLRILDHTAFSTEKSADIVICDEECDSPESVNQQTQEESPIEVHTAEDVPIAVEVHAISEDYDIETENNSSESLQDQTDEEPPAKLCKILDKSQALNVTAQQKWPLLRANSSGLYKCELCEFNSKYFSDLKQHMILKHKRTDSNVCRVCKESFSTNMLLIEHAKLHEEDPYICKYCDYKTVIFENLSQHIADTHFSDHLYWCEQCDVQFSSSSELYLHFQEHSCDEQYLCQFCEHETNDPEDLHSHVVNEHACKLIELSDKYNNGEHGQYSLLSKITFDKCKNFFVCQVCGFRSRLHTNVNRHVAIEHTKIFPHVCDDCGKGFSSMLEYCKHLNSHLSEGIYLCQYCEYSTGQIEDLKIHLDFKHSADLPHKCSDCLMRFGNERELISHLPVHETT

SEQ ID NO: 16314 - protein, 438 aa, Homo sapiens
MQAEDRSQFGSAAEMLSEQTAALGTGWESMNVQLDGAEPQVERGSQEERPWRTVPGPLEHLCCDLEEEPQSLQEKAQSAPWVPAIPQEGNTGDWEMAAALLAAGSQGLVTIKDVSLCFSQEEWRSLDPSQTDFYGEYVMQENCGIVVSLRFPIPKLDMLSQLEGGEEQWVPDPQDLEERDILRVTYTGDGSEHEGDTPELEAEPPRMLSSVSEDTVLWNPEHDESWDSMPSSSRGMLLGPPFLQEDSFSNLLCSTEMDSLLRPHTCPQCGKQFVWGSHLARHQQTHTGERPYSCLKCEKTFGRRHHLIRHQKTHLHDKTSRCSECGKNFRCNSHLASHQRVHAEGKSCKGQEVGESPGTRKRQRAPPVPKCHVCTECGKSFGRRHHLVRHWLTHTGEKPFQCPRCEKSFGRKHHLDRHLLTHQGQSPRNSWDRGTSVF

SEQ ID NO: 16315 - protein, 1327 aa, Homo sapiens
MRSFLQQDVNKTKSRLNVLNGLANNMDDLKINTDITGAKEELLDDNNFISDKESGVHKPKDCQTSFQKNNTLTLPEELSKDKSENALSGGQSSLFIHAGAPTVSSENFILPKGAAVNGPVSHSSLTKTSNMNKGSVSLTTGQPVDQPTTESCSTLKVAADLQLSTPQKASQHQVLFLLSDVAHAKNPTHSNKKLPTSASVGCDIQNSVGSNIKSDGTLINQVEVGEDGEDLLVKDDCVNTVTGISSGTDGFRSENDTNWDPQKEFIQFLMTNEETVDKAPPHSKIGLEKKRKRKMDVSKITRYTEDCFSDSNCVPNKSKMQEVDFLEQNEELQAVDSQKYALSKVKPESTDEDLESVDAFQHLIYNPDKCGEESSPVHTSTFLSNTLKKKCEESDSESPATFSTEEPSFYPCTKCNVNFREKKHLHRHMMYHLDGNSHFRHLNVPRPYACRECGRTFRDRNSLLKHMIIHQERRQKLMEEIRELKELQDEGRSARLQCPQCVFGTNCPKTFVQHAKTHEKDKRYYCCEECNFMAVTENELECHRGIAHGAVVKCPMVTSDIAQRKTQKKTFMKDSVVGSSKKSATYICKMCPFTTSAKSVLKKHTEYLHSSSCVDSFGSPLGLDKRKNDILEEPVDSDSTKTLTKQQSTTFPKNSALKQDVKRTFGSTSQSSSFSKIHKRPHRIQKARKSIAQSGVNMCNQNSSPHKNVTIKSSVDQKPKYFHQAAKEKSNAKANSHYLYRHKYENYRMIKKSGESYPVHFKKEEASSLNSLHLFSSSSNSHNNFISDPHKPDAKRPESFKDHRRVAVKRVIKESKKESSVGGEDLDSYPDFLHKMTVVVLQKLNSAEKKDSYETEDESSWDNVELGDYTTQAIEDETYSDINQEHVNLFPLFKSKVEGQEPGENATLSYDQNDGFYFEYYEDTGSNNFLHEIHDPQHLETADASLSKHSSVFHWTDLSLEKKSCPYCPATFETGVGLSNHVRGHLHRAGLSYEARHVVSPEQIATSDKMQHFKRTGTGTPVKRVRKAIEKSETTSEHTCQLCGGWFDTKIGLSNHVRGHLKRLGKTKWDAHKSPICVLNEMMQNEEKYEKILKALNSRRIIPRPFVAQKLASSDDFISQNVIPLEAYRNGLKTEALSVSASEEEGLNFLNEYDETKPELPSGKKNQSLTLIELLKNKRMGEERNSAISPQKIHNQTARKRFVQKCVLPLNEDSPLMYQPQKMDLTMHSALDCKQKKSRSRSGSKKKMLTLPHGADEVYILRCRFCGLVFRGPLSVQEDWIKHLQRHIVNANLPRTGAGMVEVTSLLKKPASITETSFSLLMAEAAS

SEQ ID NO: 16316 - protein, 425 aa, Homo sapiens
MNKMPAGEQECEYNKEGKYYSKGVKLVRKKKKIPGYRWGDIKINIIGEKDDLPIHFCDKCDLPIKIYGRIIPCKHAFCYHCANLYDKVGYKVCPRCRYPVLRIEAHKRGSVFMCSIVQQCKRTYLSQKSLQAHIKRRHKRARKQVTSASLEKVRPHIAPPQTEISDIPKRLQDRDHLSYIPPEQHTMVSLPSVQHMLQEQHNQPHKDIQAPPPELSLSLPFPIQWETVSIFTRKHGNLTVDHIQNNSDSGAKKPTPPDYYPECQSQPAVSSPHHIIPQKQHYAPPPSPSSPVNHQMPYPPQDVVTPNSVRSQVPALTTTYDPSSGYIIVKVPPDMNSPPLRAPQSQNGNPSASEFASHHYNLNILPQFTENQETLSPQFTQTDAMDHRRWPAWKRLSPCPPTRSPPPSTLHGRSHHSHQRRHRRY

SEQ ID NO: 16317 - protein, 1829 aa, Homo sapiens
MEDTPPSLSCSDCQRHFPSLPELSRHRELLHPSPNQDSEEADSIPRPYRCQQCGRGYRHPGSLVNHRRTHETGLFPCTTCGKDFSNPMALKSHMRTHAPEGRRRHRPPRPKEATPHLQGETVSTDSWGQRLGSSEGWENQTKHTEETPDCESVPDPRAASGTWEDLPTRQREGLASHPGPEDGADGWGPSTNSARAPPLPIPASSLLSNLEQYLAESVVNFTGGQEPTQSPPAEEERRYKCSQCGKTYKHAGSLTNHRQSHTLGIYPCAICFKEFSNLMALKNHSRLHAQYRPYHCPHCPRVFRLPRELLEHQQSHEGERQEPRWEEKGMPTTNGHTDESSQDQLPSAQMLNGSAELSTSGELEDSGLEEYRPFRCGDCGRTYRHAGSLINHRKSHQTGVYPCSLCSKQLFNAAALKNHVRAHHRPRQGVGENGQPSVPPAPLLLAETTHKEEEDPTTTLDHRPYKCSECGRAYRHRGSLVNHRHSHRTGEYQCSLCPRKYPNLMALRNHVRVHCKAARRSADIGAEGAPSHLKVELPPDPVEAEAAPHTDQDHVCKHEEEATDITPAADKTAAHICSICGLLFEDAESLERHGLTHGAGEKENSRTETTMSPPRAFACRDCGKSYRHSGSLINHRQTHQTGDFSCGACAKHFHTMAAMKNHLRRHSRRRSRRHRKRAGGASGGREAKLLAAESWTRELEDNEGLESPQDPSGESPHGAEGNLESDGDCLQAESEGDKCGLERDETHFQGDKESGGTGEGLERKDASLLDNLDIPGEEGGGTHFCDSLTGVDEDQKPATGQPNSSSHSANAVTGWQAGAAHTCSDCGHSFPHATGLLSHRPCHPPGIYQCSLCPKEFDSLPALRSHFQNHRPGEATSAQPFLCCLCGMIFPGRAGYRLHRRQAHSSSGMTEGSEEEGEEEGVAEAAPARSPPLQLSEAELLNQLQREVEALDSAGYGHICGCCGQTYDDLGSLERHHQSQSSGTTADKAPSPLGVAGDAMEMVVDSVLEDIVNSVSGEGGDAKSQEGAGTPLGDSLCIQGGESLLEAQPRPFRCNQCGKTYRHGGSLVNHRKIHQTGDFLCPVCSRCYPNLAAYRNHLRNHPRCKGSEPQVGPIPEAAGSSELQVGPIPEGGSNKPQHMAEEGPGQAEVEKLQEELKVEPLEEVARVKEEVWEETTVKGEEIEPRLETAEKGCQTEASSERPFSCEVCGRSYKHAGSLINHRQSHQTGHFGCQACSKGFSNLMSLKNHRRIHADPRRFRCSECGKAFRLRKQLASHQRVHMERRGGGGTRKATREDRPFRCGQCGRTYRHAGSLLNHRRSHETGQYSCPTCPKTYSNRMALKDHQRLHSENRRRRAGRSRRTAVRCALCGRSFPGRGSLERHLREHEETEREPANGQGGLDGTAASEANLTGSQGLETQLGGAEPVPHLEDGVPRPGERSQSPIRAASSEAPEPLSWGAGKAGGWPVGGGLGNHSGGWVPQFLTRSEEPEDSVHRSPCHAGDCQLNGPTLSHMDSWDNRDNSSQLQPGSHSSCSQCGKTYCQSGSLLNHNTNKTDRHYCLLCSKEFLNPVATKSHSHNHIDAQTFACPDCGKAFESHQELASHLQAHARGHSQVPAQMEEARDPKAGTGEDQVVLPGQGKAQEAPSETPRGPGESVERARGGQAVTSMAAEDKERPFRCTQCGRSYRHAGSLLNHQKAHTTGLYPCSLCPKLLPNLLSLKNHSRTHTDPKRHCCSICGKAFRTAARLEGHGRVHAPREGPFTCPHCPRHFRRRISFVQHQQQHQEEWTVAGSGRGHEGSQEEVGTQWRGKSSPKVGGGARSERREPRGF

SEQ ID NO: 16318 - protein, 568 aa, Homo sapiens
MAQVDSQDRWGEASPLSSLTEEAHDTQMLSMNLESDDEDGGEAEKEGTADPVACPRGSSPVTHENPDLPWPHPLGKEEEKFSDSSSAGGMGQKPVEMSGKASWSRDVTKINETQGSPGASRALGSLPSGLAHKLLGQMQPLGDRLPAGDDGYSGANQDAVLDVPPSFPSNGKYLCAHKSVDTSAGNSSLLCFPRPGSNWDLPTQETHTPAQASATPASLAAAVLAKARNSRKVQNQAGRREGGEAEARPYRCLRGGRAFQKPSKPLSPAETRGGAAKRYACELCGKAYSHRGTLQQHRRLHTGERPYQCSFCDKAYTWSSDHRKHIRTHTGEKPYPCPDCGKAFVRSSDLRKHQRNMHSNNKPFPCSECGLTFNKPLSLLRHQRTHLGAKPFRCPACDREFAVASRMVEHQRVHSGERPFPCPTCGKCFTKSSNLSEHQTLHTGQRPFKCADCGVAFAQPSRLVRHQRIHTGERPFPCTQCGQAFARSSTLKRHQQIHSGEKGFLCAECGRAFRIASELAQHIRMHNGERPYQCEDCGQAFTRSNHLQRHRAKHGTCKKEPIPSSSDE

SEQ ID NO: 16319 - protein, 505 aa, Homo sapiens
MTKAQESLTLEDVAVDFTWEEWQFLSPAQKDLYRDVMLENYSNLVSVGYQAGKPDALTKLEQGEPLWTLEDEIHSPAHPEIEKADDHLQQPLQNQKILKRTGQRYEHGRTLKSYLGLTNQSRRYNRKEPAEFNGDGAFLHDNHEQMPTEIEFPESRKPISTKSQFLKHQQTHNIEKAHECTDCGKAFLKKSQLTEHKRIHTGKKPHVCSLCGKAFYKKYRLTEHERAHRGEKPHGCSLCGKAFYKRYRLTEHERAHKGEKPYGCSECGKAFPRKSELTEHQRIHTGIKPHQCSECGRAFSRKSLLVVHQRTHTGEKPHTCSECGKGFIQKGNLNIHQRTHTGEKPYGCIDCGKAFSQKSCLVAHQRYHTGKTPFVCPECGQPCSQKSGLIRHQKIHSGEKPYKCSDCGKAFLTKTMLIVHHRTHTGERPYGCDECEKAYFYMSCLVKHKRIHSREKRGDSVKVENPSTASHSLSPSEHVQGKSPVNMVTVAMVAGQCEFAHILHS

SEQ ID NO: 16320 - protein, 606 aa, Homo sapiens
MSHTASSCQELVENCAVHVAGMAQEDSRRGQVPSSFYHGANQELDLSTKVYKRESGSPYSVLVDTKMSKPHLHETEEQPYFRETRAVSDVHAVKEDRENSDDTEEEEEEVSYKREQIIVEVNLNNQTLNVSKGEKGVSSQSKETPVLKTSSEEEEEESEEEATDDSNDYGENEKQKKKEKIVEKVSVTQRRTRRAASVAAATTSPTPRTTRGRRKSVEPPKRKKRATKEPKAPVQKAKCEEKETLTCEKCPRVFNTRWYLEKHMNVTHRRMQICDKCGKKFVLESELSLHQQTDCEKNIQCVSCNKSFKKLWSLHEHIKIVHGYAEKKFSCEICEKKFYTMAHVRKHMVAHTKDMPFTCETCGKSFKRSMSLKVHSLQHSGEKPFRCENCDERFQYKYQLRSHMSIHIGHKQFMCQWCGKDFNMKQYFDEHMKTHTGEKPFICEICGKSFTSRPNMKRHRRTHTGEKPYPCDVCGQRFRFSNMLKAHKEKCFRVTSPVNVPPAVQIPLTTSPATPVPSVVNTATTPTPPINMNPVSTLPPRPIPHPFSHLHIHPHPHHPHHLPIPPVPHLPPPPALFKSEPLNHRGQSEDNFLRHLAEKNSSAQHH

SEQ ID NO: 16321 - protein, 615 aa, Homo sapiens
MAERALEPEAEAEAEAGAGGEAAAEEGAAGRKARGRPRLTESDRARRRLESRKKYDVRRVYLGEAHGPWVDLRRRSGWSDAKLAAYLISLERGQRSGRHGKPWEQVPKKPKRKKRRRRNVNCLKNVVIWYEDHKHRCPYEPHLAELDPTFGLYTTAVWQCEAGHRYFQDLHSPLKPLSDSDPDSDKVGNGLVAGSSDSSSSGSASDSEESPEGQPVKAAAAAAAATPTSPVGSSGLITQEGVHIPFDVHHVESLAEQGTPLCSNPAGNGPEALETVVCVPVPVQVGAGPSALFENVPQEALGEVVASCPMPGMVPGSQVIIIAGPGYDALTAEGIHLNMAAGSGVPGSGLGEEVPCAMMEGVAAYTQTEPEGSQPSTMDATAVAGIETKKEKEDLCLLKKEEKEEPVAPELATTVPESAEPEAEADGEELDGSDMSAIIYEIPKEPEKRRRSKRSRVMDADGLLEMFHCPYEGCSQVYVALSSFQNHVNLVHRKGKTKVCPHPGCGKKFYLSNHLRRHMIIHSGVREFTCETCGKSFKRKNHLEVHRRTHTGETPLQCEICGYQCRQRASLNWHMKKHTAEVQYNFTCDRCGKRFEKLDSVKFHTLKSHPDHKPT

SEQ ID NO: 16322 - protein, 581 aa, Homo sapiens
MLCNKEFLGGHIVRHAQAHQKKGSFACVICGRKFRNRGLMQKHLKNHVKKIQRQQIAAAQQDDQEVTALEEINCSSSSISFENGNSDSKDLEVETLTASSEGNKEVIPEHVAEFIEIPISVPEDVIENVIENGSPNNSLNNVFKPLTECGDDYEEEEDEEGDYEEDDYDLNQETSVIHKINGTVCHPKDIYATDQEGNFKCPALGCVRIFKRIGFLNKHAMTVHPTDLNVRQTVMKWSKGKCKFCQRQFEDSQHFIDHLNRHSYPNVYFCLHFNCNESFKLPFQLAQHTKSHRIFQAQCSFPECHELFEDLPLLYEHEAQHYLSKTPESSAQPSETILWDVQTDSNPNQEKDSSSNEKQTISLPVSTSKSRKESTEPKTCIESMEKKTDSLVQNGNERSDDTVSNISLIDQKMPDIEPNSENNCSSSDIVNGHSEIEQTPLVSSDPALKIDTNRIRTENGSILPSVVPQEHNTLPVSQAPSKPNLTSEHTSYGLILTKPYVRPLPPSYLDERYLSMPKRRKFLTDRVDACSDQDNVYKKSVKRLRCGKCLTTYCNAEALEAHLAQKKCQTLFGFDSDDESA

SEQ ID NO: 16323 - protein, 491 aa, Homo sapiens
MEEIPAQEAAGSPRVQFQSLETQSECLSPEPQFVQDTDMEQGLTGDGETREENKLLIPKQKISEEVHSYKVRVGRLKHDITQVPETREVYKSEDRLERLQEILRKFLYLEREFRQITISKETFTSEKNNECHEPEKSFSLDSTIDADQRVLRIQNTDDNDKYDMSFNQNSASGKHEHLNLTEDFQSSECKESLMDLSHLNKWESIPNTEKSYKCDVCGKIFHQSSALTRHQRIHTREKPYKCKECEKSFSQSSSLSRHKRIHTREKPYKCEASDKSCEASDKSCSPSSGIIQHKKIHTRAKSYKCSSCERVFSRSVHLTQHQKIHKEMPCKCTVCGSDFCHTSYLLEHQRVHHEEKAYEYDEYGLAYIKQQGIHFREKPYTCSECGKDFRLNSHLIQHQRIHTGEKAHECNECGKAFSQTSCLIQHHKMHRKEKSYECNEYEGSFSHSSDLILQQEVLTRQKAFDCDVWEKNSSQRAHLVQHQSIHTKENS

SEQ ID NO: 16324 - protein, 1059 aa, Homo sapiens
MNMSQASVSFQDVTVEFTREEWQHLGPVERTLYRDVMLENYSHLISVGYCITKPKVISKLEKGEEPWSLEDEFLNQRYPGYFKVDHIKGIREKQEKPLWQEIFISDADKTLSKEGQKVLEKPFNLEIAPELSEKISCKCDSHRMNLPVASQLIISERKYSRKKTEYMNVCEKLQLDIKHEKAHAEEKSYEHGENAKAFSYKKDQHWKFQTLEESFECDGSGQGLYDKTICITPQSFLTGEKSCKDDEFRKNFDKITLFNHMRTDTRGKCSDLNEYGTSCDKTTAVEYNKVHMAMTHYECNERGINFSRKSPLTQSQRTITGWSAFESNKCEENFSQSSAHIVHQKTQAGDKFGEHNECTDALYQKLDFTAHQRIHTEDKFYLSDEHGKCRKSFYRKAHLIQHQRPHSGEKTYQYEECAKSFCSSSHPIQHPGTYVGFKLYECNECGKAFCQNSNLSKHLRIHTKEKPCDNNGCGRSYKSPLIGHQKTDAEMELCGGSEYGKTSHLKGHQRILMGEKPYECIECGKTFSKTSHLRAHQRIHTGEKPYECVECEKTFSHKTHLSVHQRVHTGEKPYECNDCGKSFTYNSALRAHQRIHTGEKPYECSDCEKTFAHNSALRAHHRIHTGEKPYECNECGRSFAHISVLKAHQRIHTGEKPYECNECGRSFTYNSALRAHQRIHTGRKPYECSDCEKTFAHNSALKIHQRIHTGEKPYECNECEKTFAHNSALRAHQNIHTGEKLYECSECGKTFFQKTRLSTHRRIHTGEKPYECSKCGKTFSQKSYLSGHERIHTGEKPYECNVCGKTFVYKAALIVHQRIHTGEKPYECNQCGKTFSQRTHLCAHQRIHTGEKPYECNECGKTFADNSALRAHHRIHTGEKPYECNDCGKTFSKTSHLRAHLRTRSGEKPYECSECGKTFSEKSYVSAHQRVHTGEKPYECNVCGKPFAHNSTLRVHQRIHTGEKSYECNDCGKTFSQKSHLSAHQRIHTGEKPYECNECGKAFAQNSTLRVHQRIHTGEKPYECDECGKTFVRKAALRVHHTRMHTREKTLACNGFGKS

SEQ ID NO: 16325 - protein, 819 aa, Homo sapiens
MMNLEKNFDKTTLFNHMRTDKRGKCSDLNEYGTSCDKTTAVEYNKVHMAMTHYECNERGINFSRKSPLTQSQRTITGWSAFESNKCEENFSQSSAHIVHQKTQAGDKFGEHNECTDALYQKLDFTAHQRIHTDFTAHQKFYLSDEHGKCRKSFYWKAHLIQHERPHSGEKTYQYEECAKSFCSSSHPIQHPGTYVGFKLYECNECGKAFCQNSNLSKHLRIHTKEKPCDNNGCGRSYKSPLIGHQKTDAEMELCGGSEYGKTSHLKGHQRILMGEKPYECIECGKTFSKTSHLRAHQRIHTGEKPYECVECEKTFSHKTHLSVHQRVHTGEKPYECNDCGKSFTYNSALRAHQRIHTGEKPYECSDCEKTFAHNSALRAHHRIHTGEKPYECNECGRSFAHISVLKAHQRIHTREKPYECNECGRSFTYNSALRAHQRIHTGRKPYECSDCEKTFAHNSALKIHQRIHTGEKPYKCNECEKTFAHNSALRAHQNIHTGEKLYECSECGKTFFQKTRLSTHRRIHTGEKPYECSKCGKTFSQKSYLSGHERIHTGEKPYECNVCGKTFVYKAALIVHQRIHTGEKPYECNECGKTFSQRTHLCAHQRIHTGEKPYECNECGKTFADNSALRAHHRIHTGEKPYECNDCGKTFSKTSHLRAHLRTRSGEKPYECSECGKTFSEKSYVSAHQRVHTGEKPYECNVCGKPFAHNSTLRVHQRIHTGEKSYECNDCGKTFSQKSHLSAHQRIHTGEKPYECNECGKAFAQNSTLRVHQRIHTGEKPYECDECGKTFVRKAALRVHHTRMHTREKTLACNGFGKS

SEQ ID NO: 16326 - protein, 573 aa, Homo sapiens
MGPLQFRDVAIEFSLEEWHCLDMAQRNLYRDVMLENYRNLVFLGIVVSKPDLITHLEQGKKPSTMQRHEMVANPSVLCSHFNQDLWPEQSIKDSFQKLILRRHKKCGHDNLQLKKGCESVDKCKVHKRGYNGLNQCLTTTQSKMFQCDKHGKVFHQFSNTNRHKIRHTGKNPCKFTECGKAFNRSSTFTTHKKIHTGEKPYKCIECGKAFNRSSHLTTHKIIHTGEKRYKCEDCGKAFNRSSNLTTHKKIHTGEKPYKCEECGKAFKRSSILTTHKRIHTGEKPYKCEECGKVFKYLSSLSTHKIIHTGEKPYKCEECGKAFNWSSHLTTHKRIHTGEKPYKCEECGKGFKYSSTLTKHKIIHTGEKPYKCEECGEAFKYSCSLTAHKIIHTGKKPYKCEECGKVFKHSSPLSKHKRIHTGEKPYKCEECGKAFSRSSILTTHKIIHTGEKPYECEDCGKAFNRSSNLTKHKKIHTGEKPYKCEECGKAFKCSSILTTHKRIHTADKPYKCEECGKDFKYSSTLTRHKKIHTGGKPHKCNKCGKAFISSSNLSRHEIIHMGGNPYKCENVAKP

SEQ ID NO: 16327 - protein, 331 aa, Homo sapiens
MRRKTRNFKHKTVKDNKVLTEGSDQESEKDNSQCCDPATNERVQAEKRQYVCTECGKAFSQSANLTVHERIHTGEKPYKCKECGKAFSHSSNLVVHRRIHTGLKPYTCSECGKSFSGKSHLIRHQGIHSGEKTYECKECGKAFSRSSGLISHHRVHTGEKPYSCIECGKAFSRSSNLTQHQRMHRGKKVYKCKECGKTCGSNTKIMDHQRIHTGEKPYECDECGKTFILRKTLNEHQRLHRREKPYKCNECGKAFTSNRNLVDHQRVHTGEKPYKCNECGKTFRQTSQVILHLRTHTKEKPYKCSECGKAYRYSSQLIQHQRKHNEEKETS

SEQ ID NO: 16328 - protein, 426 aa, Homo sapiens
MLENYGAVASLAAFPFPKPALISQLERGETPWCSVPRGALDGEAPRGISSGYPFLKPAGISHPEQVEEPLNLKLQGEGPSLICPEGVLKRKKEDFILKEEIIEEAQDLMVLSSGPQWCGSQELWFGKTCEEKSRLGRWPGYLNGGRMESSTNDIIEVIVKDEMISVEESSGNTDVNNLLGIHHKILNEQIFYICEECGKCFDQNEDFDQHQKTHNGEKVYGCKECGKAFSFRSHCIAHQRIHSGVKPYECQECAKAFVWKSNLIRHQRIHTGEKPFECKECGKGFSQNTSLTQHQRIHTGEKPYTCKECGKSFTRNPALLRHQRMHTGEKPYECKDCGKGFMWNSDLSQHQRVHTGDKPHECTDCGKSFFCKAHLIRHQRIHTGERPYKCNDCGKAFSQNSVLIKHQRRHARDKPYNCQISHLLEH

SEQ ID NO: 16329 - protein, 261 aa, Homo sapiens
MIYKCPMCREFFSERADLFMHQKIHTAEKPHKCDKCDKGFFHISELHIHWRDHTGEKVYKCDDCGKDFSTTTKLNRHKKIHTVEKPYKCYECGKAFNWSSHLQIHMRVHTGEKPYVCSECGRGFSNSSNLCMHQRVHTGEKPFKCEECGKAFRHTSSLCMHQRVHTGEKPYKCYECGKAFSQSSSLCIHQRVHTGEKPYRCCGCGKAFSQSSSLCIHQRVHTGEKPFKCDECGKAFSQSTSLCIHQRVHTKERNHLKISVI

SEQ ID NO: 16330 - protein, 613 aa, Homo sapiens
MGEAFYTVKLERLESCDTVGLSFQEVQKNTYDFECQWKDDEGNYKTVLMLQKENLPGRRAQRDRRAAGNRHIENQLGVSFQSHLPELQQFQHEGKIYEYNQVEKSPNNRGKHYKCDECGKVFSQNSRLTSHKRIHTGEKPYQCNKCGKAFTVRSNLTIHQVIHTGEKPYKCNECGKVFSQPSNLAGHQRIHTGEKPYKCNECGKAFRAHSKLTTHQVIHTGEKPYKCKECGKCFTQNSHLASHRRIHTGEKPYKCNECGKAFSVRSSLTTHQTIHTGEKPYKCNECGKVFRHNSYLAKHRRIHTGEKPYKCNECGKAFSMHSNLTKHQIIHTGEKPFKCNECVKVFTQYSHLANHRRIHTGEKPYRCDECGKAFSVRSSLTTHQAIHTGEKPYKCNDCGKVFTQNSHLASHRGIHSGEKPYKCDECGKAFSQTSQLARHWRVHTGEKPYKCNECGKAFSVHSSLTIHQTIHTGQKPYKCNDCGKVFRHNSYLAIHQRIHTGEKPYKCNECGKAFSVHSNLATHQVIHTGEKPYKCNECGKVFTQNSHLANHRRIHTGEKPYRCNECGKAFSVRSTLTTHMAVHTGDKPYKCNQCGKVFTQNSNLAKHRRIHSG

SEQ ID NO: 16331 - protein, 610 aa, Homo sapiens
MPSARGKSKSKAPITFGDLAIYFSQEEWEWLSPIQKDLYEDVMLENYRNLVSLGLSFRRPNVITLLEKGKAPWMVEPVRRRRAPDSGSKCETKKLPPNQCNKSGQSICQKLVSAQQKAPTRKSGCNKNSVLVKPKKGHSGKKPLKCNDCGKTFSRSFSLKLHQNIHTGEKPFECSNCRKAFRQISSILLHQRIHSGKKSHECNKCGESFNQRTTLILHMRIHDGKEILDCGKALSQCQSFNIHQKIHVVGNVCQCRKCGKAFNQMSSLLLHKKIHNGKKTHKYNKCGRGFKKKSVFVVHKRIHAGEKIPENAKALSQSLQQRSHHLENPFKCRKCGKLFNRISPLMLHQRIHTSEKPYKCDKCDKFFRRLSTLILHLRIHNGEKLYRCNKCEKVCNRHSSLIQHQKVHTKKKKLFECKECGKMFSGTANLKIHQNIHSEEKPFKCNKCSKVFGRQSFLIEHQRIHTGEKPYQCEECGKAFSHRISLTRHKRIHTEDRPYECDQCGKAFSQSAHLAQHERIHTGEKPYTCKTCGKAFSQRTSLILHERSHTGEKPYECNECGKAFSSGSDLIRHQRSHSSEKPYECSKCGKAYSRSSSLIRHQNTHSEEKA

SEQ ID NO: 16332 - protein, 619 aa, Homo sapiens [sequence omitted]

SEQ ID NO: 16333 - protein, 464 aa, Homo sapiens
MVSGLRLASRSGEEGWLKPAVARLGPPRHRLRNLRTESPWRSRGSVLFCSGPGRAGRAAEPLHPVCTCGRHFRRPEPCREPLASPIQDSVAFEDVAVNFTQEEWALLDSSQKNLYREVMQETCRNLASVGSQWKDQNIEDHFEKPGKDIRNHIVQRLCESKEDGQYGEVVSQIPNLDLNENISTGLKPCECSICGKVFVRHSLLNRHILAHSGYKPYGEKQYKCEQCGKFFVSVPGVRRHMIMHSGNPAYKCTICGKAFYFLNSVERHQRTHTGEKPYKCKQCGKAFTVSGSCLIHERTHTGEKPYECKECGKTFRFSCSFKTHERTHTGERPYKCTKCDKAFSCSTSLRYHGSIHTGERPYECKQCGKAFSRLSSLCNHRSTHTGEKPYECKQCDQAFSRLSSLHLHERIHTGEKPYECKKCGKAYTRSSHLTRHERSHDIEAGCSDSAYNPSTLGGQGVWIA

SEQ ID NO: 16334 - protein, 389 aa, Homo sapiens
MDSVSFEDVAVAFTQEEWALLDPSQKNLYRDVMQEIFRNLASVGNKSEDQNIQDDFKNPGRNLSSHVVERLFEIKEGSQYGETFSQDSNLNLNKKVSTGVKPCECSVCGKVFICHSALHRHILSHIGNKLFECEECPEKLYHCKQCGKAFISLTSVDRHMVTHTSNGPYKGPVYEKPFDFPSVFQMPQSTYTGEKTYKCKHCDKAFNYSSYLREHERTHTGEKPYACKKCGKSFTFSSSLRQHERSHTGEKPYECKECGKAFSRSTYLGIHERTHTGEKPYECIKCGKAFRCSRVLRVHERTHSGEKPYECKQCGKAFKYSSNLCEHERTHTGVKPYGCKECGKSFTSSSALRSHERTHTGEKPYECKKCGKAFSCSSSLRKHERAYMW

SEQ ID NO: 16335 - protein, 534 aa, Homo sapiens
MLSPVSRDASDALQGRKCLRPRSRRLPLPAAVRAHGPMAELTDSARGCVVFEDVFVYFSREEWELLDDAQRLLYHDVMLENFALLASLGIAFSRSRAVMKLERGEEPWVYDQVDMTSATEREAQRGLRPGCWHGVEDEEVSSEQSIFVAGVSEVRTLMAELESHPCDICGPILKDTLHLAKYHGGKARQKPYLCGACGKQFWFSTDFDQHQNQPNGGKLFPRKEGRDSVKSCRVHVPEKTLTCGKGRRDFSATSGLLQHQASLSSMKPHKSTKLVSGFLMGQRYHRCGECGKAFTRKDTLARHQRIHTGERPYECNECGKFFSQSYDLFKHQTVHTGERPYECSECGKFFRQISGLIEHRRVHTGERLYQCGKCGKFFSSKSNLIRHQEVHTGARPYVCSECGKEFSRKHTLVLHQRTHTGERPYECSECGKAFSQSSHLNVHWRIHSSDYECSRCGKAFSCISKLIQHQKVHSGEKPYECSKCGKAFTQRPNLIRHWKVHTGERPYVCSECGREFIRKQTLVLHQRVHAGEKL

SEQ ID NO: 16336 - protein, 452 aa, Homo sapiens
MFATSGAVAAGKPYSCSECGKSFCYSSVLLRHERAHGGDGRFRCLECGERCARAADLRAHRRTHAGQTLYICSECGQSFRHSGRLDLHLGAHRQRCRTCPCRTCGRRFPHLPALLLHRRRQHLPERPRRCPLCARTFRQSALLFHQARAHPLGTTSDPAAPPHRCAQCPRAFRSGAGLRSHARIHVSRSPTRPRVSDAHQCGVCGKCFGKSSTLTRHLQTHSGEKPFKCPECGKGFLESATLVRHQRTHTGEKPYACGDCGRCFSESSTLLRHRRSHQGERPHACATCGKGFGQRSDLVVHQRIHTGEKPFACPECGRRFSDRSDLTKHRRTHTGEKPYRCELCGKRFTCVSNLNVHRRNHAGHKPHKCPECSKAFSVASKLALHRKTHLGERPAECAECGKCFSHSRSLSQHQRAHTRARTAAAVAIQSAVGTALVFEGPAEQEKPGFSVS

SEQ ID NO: 16337 - protein, 581 aa, Homo sapiens
MAMSQESLTFKDVFVDFTLEEWQQLDSAQKNLYRDVMLENYSHLVSVGHLVGKPDVIFRLGPGDESWMADGGTPVRTCAGEDRPEVWEVDEQIDHYKESQDKFLWQAAFIGKETLKDESGQECKICRKIIYLNTDFVSVKQRLPKYYSWERCSKHHLNFLGQNRSYVRKKDDGCKAYWKVCLHYNLHKAQPAERFFDPNQRGKALHQKQALRKSQRSQTGEKLYKCTECGKVFIQKANLVVHQRTHTGEKPYECCECAKAFSQKSTLIAHQRTHTGEKPYECSECGKTFIQKSTLIKHQRTHTGEKPFVCDKCPKAFKSSYHLIRHEKTHIRQAFYKGIKCTTSSLIYQRIHTSEKPQCSEHGKASDEKPSPTKHWRTHTKENIYECSKCGKSFRGKSHLSVHQRIHTGEKPYECSICGKTFSGKSHLSVHHRTHTGEKPYECRRCGKAFGEKSTLIVHQRMHTGEKPYKCNECGKAFSEKSPLIKHQRIHTGERPYECTDCKKAFSRKSTLIKHQRIHTGEKPYKCSECGKAFSVKSTLIVHHRTHTGEKPYECRDCGKAFSGKSTLIKHQRSHTGDKNL

SEQ ID NO: 16338 - protein, 568 aa, Homo sapiens
MGLLTFRDVAIEFSLEEWQCLDTAQRNLYKNVILENYRNLVFLGIAVSKQDLITCLEQEKEPLTVKRHEMVNEPPVMCSHFAQEFWPEQNIKDSFEKVTLRRYEKCGNDNFQLKGCKSVDECKLHKGGYNGLNQCLPTMQSKMFQCDKYVKVFNKFSHSDRHKIKHMENKPFKCKECGRSFCMLSHLTRHERNYTKVNFCKCEECEKAVNQSSKLTKHKRIYTCEKLYKCQECDRTFNQFSNLTEYKKDYAREKPYKCEECGKAFNQSSHLTTHKIIHTGEKPYKCEECGKAFNQFSNLTTHKKIHTGEQPYICEECGKAFTQSSTLTTHKRIHTGEKPYKCEECGKAFNRSSKLTEHKNIHTGEQPYKCEECGKAFNRSSNLTEHRKIHTEEKPYKCKECGKAFKHSSALTTHKRIHTGEKPYKCEECGKAFNRSSKLTEHKKLHTGKKPYKCEECGKAFIQSSKLTEHKKIHSGEIPYKCEECGKAFKHSSSLTTHKRIHTGEKPYKCEECGKAFSRSSKLTEHKIIHTGEKPYKCERCDKAFNQSANLTKHKKIHTGEKLQNWNV

SEQ ID NO: 16339 - protein, 588 aa, Homo sapiens
MLENYRNLVFLGIAAFKPDLIIFLEQGKEPWNMKRHEMVEEPPVICSHFSQEFWPEQGIEDSFQKMILRRYDKCGHENLHLKISCTNVDECNVHKEGYNKLNQSLTTTQSKVFQCGKYANVFHKCSNSNRHKIRHTGEKGLKCKEYVRSFCMLSHLSQHERIYTRENSYKCEENGKAFNWSSTLTYYKSIHTGEKPYKCEECGKAFSKFSILTKHKVIHTGEKPYKCEECGKAFNRSSILTKHKIIHTGEKPYKCEECGKGFSSVSTLNTHKAIHAEEKPYKCEECGKASNSSSKLMEHKRIHTGEKPYKCEECGKAFSWSSSLTEHKRIHAGEKPYKCEECGKAFNRSSILTKHKIIHTGEKPYKCEGCGKAFSKVSTLNTHKAIHAEEKPYKCEECGKASNSSSKLMEHKRIHTGEKPYKCEECGKAFSWSSSLTEHKRIHAGEKPYKCEECGKAFTWSSSFTKHKRIHAAEKPYKCEECGKGFSTFSILTKHKIIHTGEKRYKCEECGKAFSWSSILTEHKIIHTGEKPYKCEECGKAFSRSSSLTRHKRIHTGEKPYKCEECGKAFKSSSTVSYHKKIHTGENP

SEQ ID NO: 16340 - protein, 584 aa, Homo sapiens
MALSQGLFTFKDVAIEFSQEEWECLDPAQRALYRDVMLENYRNLLSLDEDNIPPEDDISVGFTSKGLSPKENNKEELYHLVILERKESHGINNFDLKEVWENMPKFDSLWDYDVKNYKGMPLTCNKNLTHRKDQQHNKSSIHFSLKQSVSIRDSAHQYFIHDKPFIRNLLKLKNNIRYAGNKYVKCFENKIGLSLQAQLAELQRFQTGEKMYECNPVEKSINSSSVSPLPPCVKNICNKYRKILKYPLLHTQYGRTHIREKSYKCNDCGKAFSKSSNLTNHQRIHSGQRPYKCNECGKAFNQCSNLTRHQRVHTGEKPYQCNICGKVCSQNSNLASHQRMHTGEKPYKCNECGKAFIQRSHLWGHERIHTGEKPYKCNECDKAFAERSSLTQHKRIHTGEKPYICNECGKAFKQCSHLTRHQNIHPGEKPHKCNVCGRAFIQSSSLVEHQRIHTGEKPYKCNKCDKAFIKRSHLWGHQRTHTGEKPYKCTECGKAFTERSNLTQHKKIHTGEKPYKCTECGKAFTQFANLTRHQKIHIEKKHCKHNIHGNALFQSSNLGDHQKSYNREKHIKYNETKIKYSSCT

SEQ ID NO: 16341 - protein, 525 aa, Homo sapiens
MGTISLCIGVCAFEGANTSTSFYKLVYTAILSYSIQDLLPEQDMKDLCQKVTLTRHRSWGLDNLHLVKDWRTVNEGKGQKEYCNRLTQCSSTKSKIFQCIECGRNFSWRSILTEHKRIHTGEKPYKCEECGKVFNRCSNLTKHKRIHTGEKPYKCDECGKVFNWWSQLTNHKKIHTGEKPYKCDECDKVFNWWSQLTSHKKIHSGEKPYPCEECGKAFTQFSNLTQHKRIHTGEKPYKCKECCKAFNKFSNLTQHKRIHTGEKPYKCEECGNVFNECSHLTRHRRIHTGEKPYKCEECGKAFTQFASLTRHKRIHTGEKPYQCEECGKTFNRCSHLSSHKRIHTGEKPYKCEECGRTFTQFSNLTQHKRIHTGEKPYKCKECGKAFNKFSSLTQHRRIHTGVKPYKCEECGKVFKQCSHLTSHKRIHTGEKPYKCKECGKAFYQSSILSKHKRIHTEEKPYKCEECGKAFNQFSSLTRHKRIHTGEKRYKCKECGKGFYQSSIHSKYKRIYTGEEPDKCKKCGSL

SEQ ID NO: 16342 - protein, 411 aa, Homo sapiens
MAKRPGSPGSREMGLLTFRDVVIEFSLEEWQCLDHAQQNLYRDVMLENYRNLVSLGIAVSKPDLITCLEQNKEPWNIKRNEMVTKHPVMCSHFTQDLPPELGIKDSLQKVIPRRYGKSGHDNLQVKTCKSMGECEVQKGGCNEVNQCLSTTQNKIFQTHKCVKVFGKFSNSNRHKTRHTGKKHFKCKKYGKSFCMVSQLHQHQIIHTRENSYQCEECGKPFNCSSTLSKHKRIHTGEKPYRCEECGKAFTWSSTLTKHRRIHTGEKPYTCEECGQAFSRSSTLANHKRIHTGEKPYTCEECGKAFSLSSSLTYHKRIHTGEKPYTCEECGKAFNCSSTLKKHKIIHTGEKPYKCKECGKAFAFSSTLNTHKRIHTGEEPYKCEECDKAFKWSSSLANHKSMHTGEKPYKCE

SEQ ID NO: 16343 - protein, 530 aa, Homo sapiens
MPGPPGSLEMGPLTFRDVAIEFSLEEWQCLDTAQRNLYRKVMFENYRNLVFLGIAVSKPHLITCLEQGKEPWNRKRQEMVAKPPVIYSHFTEDLWPEHSIKDSFQKVILRGYGKCGHENLQLRISCKSVDESKVFKEGYNELNQCLRTTQSKIFQCDKYVKVFHKFSNSNSHKKRNTGKKVFKCKECGKSFCMLSHLTQHIRIHTRENSYKCEECGKVLNWFSELIKHKGIHMGEKPYKCEECGKAFNQSSTLIKHKKIHIEEKPFKCEECGKAFSLFSILSKHKIIHTGDKPYKCDECHKAFNWFATLTNHKRIHTGEKPFKCEECGKDFNQFSNLTKHKKIHTGEKPYKCEECGKAFNQFANLTRHKKIHTGEKSYKCEECGKAFIQSSNLTEHMRIHTGEKPYKCEECGKAFNGCSSLTRHKRIHTRENTYKCEECGKGFTLFSTLTNHKVIHTGEKSYKCDECGNVFNWPATLANHKRIHAREKPYKCEECGKAFNRSSHLTRHKKIHTGEKLYKPEKCDNNFDNT

SEQ ID NO: 16344 - protein, 645 aa, Homo sapiens
MEPLKFRDVAIEFSLEEWQCLDTIQQNLYRNVMLENYRNLVFLGIVVSKPDLITCLEQEKEPWTRKRHRMVAEPPVICSHFAQDFSPEQNIKDSFQKVTPRRYGKCEHENLQLSKSVDECKVQKGGYNGLNQCLPTTQSKIFQCDKYMKIFHKFSNLNGHKVRHTRKKPFKYKEFGKSFCIFSNLTQHKIICTRVNFYKCEDCGKAFNGSSIFTKHKRIHIGEKSYICEECGKACNQFTNLTTHKIIYTRDKLYKREECSKAFNLSSHITTHTIIHTGENPYKREECDKAFNQSLTLTTHKIIHTREKLNEYKECGKAFNQSSHLTRHKIIHTGEKPYKCEECGKAFNQSSHLTRHKIIHTGEKPYRCEECGKAFRQSSHLTTHKIIHTGEKPYKCEECGKAFNKSSHLTRHKSIHTGEKPYQCEKCGKASNQSSNLTEHKNIHTEEKPYKCEECGKAFNQFSNLTTHKRIHTGEKPYKCEECGKAFNQSSILTTHKRIHTGEKSYKCEECGKAFYRSSKLTEHKKIHTGEKPYTCEECGKAFNHSSHLATHKVIHTGEKPYQCEECGKAFNQSSHLTRHKRIHTGEKPYQCEKCGKAFNQSSNLTGHKKIHTGEKLYKPKRCNSDFENTSKFSKHKRNYAGEKS

SEQ ID NO: 16345 - protein, 498 aa, Homo sapiens
MELLTFRDVTIEFSLEEWEFLNPAQQSLYRKVMLENYRNLVSLGLTVSKPELISRLEQRQEPWNVKRHETIAKPPAMSSHYTEDLLPEQCMQDSFQKVILRRYGSCGLEDLHLRKDGENVGECKDQKEIYNGLNQCLSTLPSKIFPYNKCVKVFSKSSNLNRENIRHTTEKLFKCMQCGKVFKSHSGLSYHKIIHTEEKLCICEECGKTFKWFSYLTKHKRIHTGEKPYKCEECGKAFNWCSSLTKHKRIHTGEKPYKCEECGKAFHWCSPFVRHKKIHTGEKPYTCEDCGRAFNRHSHLTKHKTIHTGKKPYKCKECGKAFNHCSLLTIHERTHTGEKPYKCEECGKAFNSSSILTEHKVIHSGEKPYKCEKCDKVFKRFSYLTKHKRIHTGEKPYKCEECGKAFNWSSILTEHKRIHTGEKPYNCEECGKAFNRCSHLTRHKKIHTAVKRYKCEECGKAFKRCSHLNEHKRVQRGEKSCKYKKCGEAFNHCSNLTT

SEQ ID NO: 16346 - protein, 524 aa, Homo sapiens
MKEESAAQLGCCHRPMALGGTGGSLSPSLDFQLFRGDQVFSACRPLPDMVDAHGPSCASWLCPLPLAPGRSALLACLQDLDLNLCTPQPAPLGTDLQGLQEDALSMKHEPPGLQASSTDDKKFTVKYPQNKDKLGKQPERAGEGAPCPAFSSHNSSSPPPLQNRKSPSPLAFCPCPPVNSISKELPFLLHAFYPGYPLLLPPPHLFTYGALPSDQCPHLLMLPQDPSYPTMAMPSLLMMVNELGHPSARWETLLPYPGAFQASGQALPSQARNPGAGAAPTDSPGLERGGMASPAKRVPLSSQTGTAALPYPLKKKNGKILYECNICGKSFGQLSNLKVHLRVHSGERPFQCALCQKSFTQLAHLQKHHLVHTGERPHKCSIPWVPGRNHWKSFQAWREREVCHKRFSSSSNLKTHLRLHSGARPFQCSVCRSRFTQHIHLKLHHRLHAPQPCGLVHTQLPLASLACLAQWHQGALDLMAVASEKHMGYDIDEVKVSSTSQGKARAVSLSSAGTPLVMGQDQNN

SEQ ID NO: 16347 - protein, 378 aa, Homo sapiens
MISFQESVTFQDVAVDFTAEEWQLLDCAERTLYWDVMLENYRNLISVGCPITKTKVILKVEQGQEPWMVEGANPHESSPESDYPLVDEPGKHRESKDNFLKSVLLTFNKILTMERIHHYNMSTSLNPMRKKSYKSFEKCLPPNLDLLKYNRSYTVENAYECSECGKAFKKKFHFIRHEKNHTRKKPFECNDCGKAYSRKAHLATHQKIHNGERPFVCNDCGKAFMHKAQLVVHQRLHTGEKPYECSQCGKTFTWNSSFNQHVKSHTLEKSFECKECGKTFRYSSSLYKHSRFHTGEKPYQCIICGKAFGNTSVLVTHQRIHTGEKPYSCIECGKAFIKKSHLLRHQITHTGEKPYECNRCGKAFSQKSNLIVHQKIHT

SEQ ID NO: 16348 - protein, 1237 aa, Homo sapiens
MGDMKTPDFDDLLAAFDIPDIDANEAIHSGPEENEGPGGPGKPEPGVGSESEDTAAASAGDGPGVPAQASDHGLPPPDISVVSVIVKNTVCPEQSEALAGGSAGDGAQAAGVTKEGPVGPHRMQNGFGSPEPSLPGTPHSPAPPSGGTWKEKGMEGKTPLDLFAHFGPEPGDHSDPLPPSAPSPTREGALTPPPFPSSFELAQENGPGMQPPVSSPPLGALKQESCSPHHPQVLAQQGSGSSPKATDIPASASPPPVAGVPFFKQSPGHQSPLASPKVPVCQPLKEEDDDEGPVDKSSPGSPQSPSSGAEAADEDSNDSPASSSSRPLKVRIKTIKTSCGNITRTVTQVPSDPDPPAPLAEGAFLAEASLLKLSPATPTSEGPKVVSVQLGDGTRLKGTVLPVATIQNASTAMLMAASVARKAVVLPGGTATSPKMIAKNVLGLVPQALPKADGRAGLGTGGQKVNGASVVMVQPSKTATGPSTGGGTVISRTQSSLVEAFNKILNSKNLLPAYRPNLSPPAEAGLALPPTGYRCLECGDAFSLEKSLARHYDRRSMRIEVTCNHCARRLVFFNKCSLLLHAREHKDKGLVMQCSHLVMRPVALDQMVGQPDITPLLPVAVPPVSGPLALPALGKGEGAITSSAITTVAAEAPVLPLSTEPPAAPATSAYTCFRCLECKEQCRDKAGMAAHFQQLGPPAPGATSNVCPTCPMMLPNRCSFSAHQRMHKNRPPHVCPECGGNFLQANFQTHLREACLHVSRRVGYRCPSCSVVFGGVNSIKSHIQTSHCEVFHKCPICPMAFKSGPSAHAHLYSQHPSFQTQQAKLIYKCAMCDTVFTHKPLLSSHFDQHLLPQRVSVFKCPSCPLLFAQKRTMLEHLKNTHQSGRLEETAGKGAGGALLTPKTEPEELAVSQGGAAPATEESSSSSEEEEVPSSPEPPRPAKRPRRELGSKGLKGGGGGPGGWTCGLCHSWFPERDEYVAHMKKEHGKSVKKFPCRLCERSFCSAPSLRRHVRVNHEGIKRVYPCRYCTEGKRTFSSRLILEKHVQVRHGLQLGAQSPGRGTTLARGSSARAQGPGRKRRQSSDSCSEEPDSTTPPAKSPRGGPGSGGHGPLRYRSSSSTEQSLMMGLRVEDGAQQCLDCGLCFASPGSLSRHRFISHKKRRGVGKASALGLGDGEEEAPPSRSDPDGGDSPLPASGGPLTCKVCGKSCDSPLNLKTHFRTHGMAFIRARQGAVGDN

SEQ ID NO: 16349 - protein, 276 aa, Homo sapiens
MAPPPAPLLAPRPGETRPGCRKPGTVSFADVAVYFSPEEWGCLRPAQRALYRDVMQETYGHLGALGFPGPKPALISWMEQESEAWSPAAQDPEKGERLGGARRGDVPNRKEEEPEEVPRAKGPRKAPVKESPEVLVERNPDPAISVAPARAQPPKNAAWDPTTGAQPPAPIPSMDAQAGQRRHVCTDCGRRFTYPSLLVSHRRMHSGERPFPCPECGMRFKRKFAVEAHQWIHRSCSGGRRGRRPGIRAVPRAPVRGDRDPPVLFRHYPDIFEECG

SEQ ID NO: 16350 - protein, 500 aa, Homo sapiens
MAPPSAPLPAQGPGKARPSRKRGRRPRALKFVDVAVYFSPEEWGCLRPAQRALYRDVMRETYGHLGALGCAGPKPALISWLERNTDDWEPAALDPQEYPRGLTVQRKSRTRKKNGEKEVFPPKEAPRKGKRGRRPSKPRLIPRQTSGGPICPDCGCTFPDHQALESHKCAQNLKKPYPCPDCGRRFSYPSLLVSHRRAHSGECPYVCDQCGKRFSQRKNLSQHQVIHTGEKPYHCPDCGRCFRRSRSLANHRTTHTGEKPHQCPSCGRRFAYPSLLAIHQRTHTGEKPYTCLECNRRFRQRTALVIHQRIHTGEKPYPCPDCERRFSSSSRLVSHRRVHSGERPYACEHCEARFSQRSTLLQHQLLHTGEKPYPCPDCGRAFRRSGSLAIHRSTHTEEKLHACDDCGRRFAYPSLLASHRRVHSGERPYACDLCSKRFAQWSHLAQHQLLHTGEKPFPCLECGRCFRQRWSLAVHKCSPKAPNCSPRSAIGGSSQRGNAH

SEQ ID NO: 16351 - protein, 566 aa, Homo sapiens
MPCCSHRRCREDPGTSESQEMDPVAFDDVAVNFTQEEWALLDISQRKLYKEVMLETFRNLTSVGKSWKDQNIEYEYQNPRRNFRSLIEKKVNEIKDDSHCGETFTQVPDDRLNFQEKKASPEIKSCDSFVCGEVGLGNSSFNMNIRGDIGHKAYEYQEYGPKPCKCQQPKKAFRYHPSFRTPQRDHTGEKPYACKECGKTFISHSSIQRHVVMHSGDGPYKCKFCGKAFHCLSLYLIHERIHTGEKPYECKQCGKSFSYSATLRIHERTHTGEKPYECQQCGKAFHSPRCYRRHERIHTGEKAYQCKECGKAFTCPQYVRIHERTHSRKKPYECTQCGKALSSLTSFQTHIRMHSGERPYECKICGKGFCSANSFQRHEKTHSGEKPYKCKQCGKAFIHSSSLRYHERIHTGEKPYECKQCGKAFRSSSHLQLHGRTHTGEKPYECQECGKAFRSMKNLQSHERTQTHVRIHSGERPYKCKLCGKGFYCPKSLQRHEKTHTGEKLYECKQCGEAFSSSSSFRYHERTHTGEKPYKCKQCGKAFRAASVLRMHGRTHPEDKPYECKQ

SEQ ID NO: 16352 - protein, 312 aa, Homo sapiens
MSLCSPTHSAEMSLFLQGPEEMLPLSSEGSEMGSEKEQSPEPHLPEEGEGGKPWRVDDSEGSWIPPGEKEHGQESLSDELQETHPKKPWQKVTVRARELGDPIAHPRHEADEKPFICAQCGKTFNNTSNLRTHQRIHTGEKPYKCSECGKSFSRSSNRIRHERIHLEEKHYKCPKCQESFRRRSDLTTHQQDHLGKRPYRCDICGKSFSQSATLAVHHRTHLEPAPYICCECGKSFSNSSSFGVHHRTHTGERPYECTECGRTFSDISNFGAHQRTHRGEKPYRCTVCGKHFSRSSNLKPFIPLWRMVLYSL

SEQ ID NO: 16353 - protein, 519 aa, Homo sapiens
MASSPAVDVSCRRREKRRQLDARRSKCRIRLGGHMEQWCLLKERLGFSLHSQLAKFLLDRYTSSGCVLCAGPEPLPPKGLQYLVLLSHAHSRECSLVPGLRGPGGQDGGLVWECSAGHTFSWGPSLSPTPSEAPKPASLPHTTRRSWCSEATSGQELADLESEHDERTQEARLPRRVGPPPETFPPPGEEEGEEEEDNDEDEEEMLSDASLWTYSSSPDDSEPDAPRLLPSPVTCTPKEGETPPAPAALSSPLAVPALSASSLSSRAPPPAEVRVQPQLSRTPQAAQQTEALASTGSQAQSAPTPAWDEDTAQIGPKRIRKAAKRELMPCDFPGCGRIFSNRQYLNHHKKYQHIHQKSFSCPEPACGKSFNFKKHLKEHMKLHSDTRDYICEFCARSFRTSSNLVIHRRIHTGEKPLQCEICGFTCRQKASLNWHQRKHAETVAALRFPCEFCGKRFEKPDSVAAHRSKSHPALLLAPQESPSGPLEPCPSISAPGPLGSSEGSRPSASPQAPTLLPQQ

SEQ ID NO: 16354 - protein, 515 aa, Homo sapiens
MGLLAFRDVALEFSPEEWECLDPAQRSLYRDVMLENYRNLISLGEDSFNMQFLFHSLAMSKPELIICLEARKEPWNVNTEKTARHSVLSSYLTEDILPEQGLQVSFQKVMLRRYERCCLEKLRLRNDWEIVGEWKGQKASYNGLDLCSATTHSKNFQCNKCVKGFSKFANLNKCKISHTGEKPFKCKECGNVSCMSLIMTQQQRIHIGENPYQCKKCGKAFNECSCFTDCKRIHVGEKHCKCEECNNIFKSCSSLAVVEKNHTEKKTYRCEECGKAFNLCSVLTKHKKIHTGEKPYKCEECGKSFKLFPYLTQHKRIHSREKPYKCEECGKVFKLLSYLTQHRRIHTGEKTFRCEECGKAFNQSSHLTEHRRIHTGEKPYKCEECGKAFTWFSYLIQHKRIHTGQKPYKCEECGKAFTWFSYLTQHKRIHTGEKPYKCDECGKAFNWFSYLTNHKRIHTGEKPYKCEECGKAFGQSSHLSKHKTIHTREKPYKCEECGKAFNHSAQLAVHEKTHT

SEQ ID NO: 16355 - protein, 374 aa, Homo sapiens
MEPGGEPTGAKESSTLMESLAAVKAAFLAQAPSGSRSAEVQAAQSTEPAAEAGAPEGEGHRGGPPRALGSLGLCENQEARERPGGSPRGPVTSEKTGGQSGLESDVPPNAGPGAEGGGSWKGRPFPCGACGRSFKCSSDAAKHRSIHSGEKPYECSDCGKAFIHSSHVVRHQRAHSGERPYACAECGKAFGQSFNLLRHQRVHTGEKPYACADCGKAFGQRSDAAKHRRTHTGERLYACGECGKRFLHSSNVVRHRRTHHGENPYECRECGQAFSQSSNLLQHQRVHTGERPFACQDCGRAFSRSSFLREHRRIHTGEKPHQCGHCGRAFRALSGFFRHQRLHTGEKPFRCTECGRAFRLSFHLIQHRRVHGAE

SEQ ID NO: 16356 - protein, 545 aa, Homo sapiens
MKQEDNQGVCAHQDSEDKGMGSDFEDSEDREGDPEEREMGSNPHDTNKREGHPEPEMGSNPQDSRHREAVPDICTEGQLSEEEGVSVRGEEDDQSGVADMAMFPGLSESDSISRSLREDDDESAGENRLEEEEEQPAPPVLPWRRHLSLGSRHRGDKPAHRRFHRLHHPMAVDLGELDSLVASIMDAPTICPDCGESFSPGAAFLQHQRIHRLAEAAAAASLEPFGLAGECDAMVGMMGVGVAGGFGAGPPLARPPREKPFRCGECGKGFSRNTYLTNHLRLHTGERPNLCADCGKSFSWRADLLKHRRLHTGEKPYPCPECGEAFSLSSHLLSHRRAHAAASGAGAAALRPFACGECGKGFVRRSHLANHQRIHTGEKPHGCGECGKRFSWRSDLVKHQRVHTGEKPYMCSECGETFSVSSHLFTHKRTHSGERPYVCRECGKGFGRNSHLVNHLRVHTGEKPFRCGQCEKRFSDFSTLTQHQRTHTGEKPYTCIECGKSFIQSSHLIRHRRIHTGNKPHKCAGCGKGFRYKTHLAQHQKLHLC

SEQ ID NO: 16357 - protein, 642 aa, Homo sapiens
MEEERKTAELQKNRIQDSVVFEDVAVDFTQEEWALLDLAQRNLYRDVMLENFQNLASLGYPLHTPHLISQWEQEEDLQTVKRELIQGIFMGEHREGFETQLKTNESVASQDICGEKISNEQKIVRFKRNDSWFSSLHENQESCGIDYQNKSHERHLRNHMVENIYECYEENQDGQTFSQVPNLDSLKRNTEVKSCECHECGKAFVDHSSLKSHIRSHTGSKPYQCKECGKAFHFLACFKKHMKTPTEEKPYECKECTKAFSCSSFFRAHMKIHIGKTNYECKECGKGFSCSSSLTEHKRIHSGDKPYECKECGKAFSCSSSLSKHKRIHSGDKPYECKECGKAFSSSSHLIIHIRIHTGEKPYECKECGKAFSESSKLTVHGRTHTGEKPYKCKECGKAYNCPSSLSIHMRKHTGEKPYECLECGKAFYLPTSLNTHVKNQSREKPYECKECGKAFSCPSSFRAHVRDHTGKIQYECKECGKTFSRSSSLTEHLRTHSGEKPYECKECGKAFISSSHLTVHIRTHTGEKPYECKKCGKAFIYPSALRIHMRTHTGEKPYECKECGKAFRHSSYLTVHARMHTGEKPFECLECGKAFSCPSSFRRHVRSHTGEKPYECKECGKAFVCPAYFRRHVKTHTRENI

SEQ ID NO: 16358 - protein, 686 aa, Homo sapiens
MEVVTFGDVAVHFSREEWQCLDPGQRALYREVMLENHSSVAGLAGFLVFKPELISRLEQGEEPWVLDLQGAEGTEAPRTSKTDSTIRTENEQACEDMDILKSESYGTVVRISPQDFPQNPGFGDVSDSEVWLDSHLGSPGLKVTGFTFQNNCLNEETVVPKTFTKDAPQGCKELGSSGLDCQPLESQGESAEGMSQRCEECGKGIRATSDIALHWEINTQKISRCQECQKKLSDCLQGKHTNNCHGEKPYECAECGKVFRLCSQLNQHQRIHTGEKPFKCTECGKAFRLSSKLIQHQRIHTGEKPYRCEECGKAFGQSSSLIHHQRIHTGERPYGCRECGKAFSQQSQLVRHQRTHTGERPYPCKECGKAFSQSSTLAQHQRMHTGEKAQILKASDSPSLVAHQRIHAVEKPFKCDECGKAFRWISRLSQHQLIHTGEKPYKCNKCTKAFGCSSRLIRHQRTHTGEKPFKCDECGKGFVQGSHLIQHQRIHTGEKPYVCNDCGKAFSQSSSLIYHQRIHKGEKPYECLQCGKAFSMSTQLTIHQRVHTGERPYKCNECGKAFSQNSTLFQHQIIHAGVKPYECSECGKAFSRSSYLIEHQRIHTRAQWFYEYGNALEGSTFVSRKKVNTIKKLHQCEDCEKIFRWRSHLIIHQRIHTGEKPYKCNDCGKAFNRSSRLTQHQKIHMG

SEQ ID NO: 16359 - protein, 446 aa, Homo sapiens
MEVPPATKFGETFAFENRLESQQGLFPGEDLGDPFLQERGLEQMAVIYKEIPLGEQDEENDDYEGNFSLCSSPVQHQSIPPGTRPQDDELFGQTFLQKSDLSMCQIIHSEEPSPCDCAETDRGDSGPNAPHRTPQPAKPYACRECGKAFSQSSHLLRHLVIHTGEKPYECCECGKAFSQSSHLLRHQIIHTGEKPYECRECGKAFRQSSALTQHQKIHTGKRPYECRECGKDFSRSSSLRKHERIHTGERPYQCKECGKSFNQSSGLSQHRKIHTLKKPHECDLCGKAFCHRSHLIRHQRIHTGKKPYKCDECGKAFSQSSNLIEHRKTHTGEKPYKCQKCGKAFSQSSSLIEHQRIHTGEKPYECCQCGKAFCHSSALIQHQRIHTGKKPYTCECGKAFRHRSALIEHYKTHTREKPYVCNLCGKSFRGSSHLIRHQKIHSGEKL

SEQ ID NO: 16360 - protein, 531 aa, Homo sapiens
MGFLHVGQDGLELPTSGDPPASASQSAGITGVSHRTQPPCFEGLTSKDLVREEKTRKRKRKAKESGMALLQGLLTFRDVAIEFSQEEWKCLDPAQRTLYRDVMLENYRNLVSLDTSSKCMMKMFSSTGQGNTEVVHTGTLQIHASHHIGDTCFQEIEKDIHDFVFQWQENETNGHEALMTKTKKLMSSTERHDQRHAGNKPIKNELGSSFHSHLPEVHIFHPEGKIGNQVEKAINDAFSVSASQRISCRPKTRISNKYRNNFLQSSLLTQKREVHTREKSFQRNESGKAFNGSSLLKKHQIIHLGDKQYKCDVCGKDFHQKRYLACHRCHTGENPYTCNECGKTFSHNSALLVHKAIHTGEKPYKCNECGKVFNQQSNLARHHRVHTGEKPYKCEECDKVFSRKSHLERHRRIHTGEKPYKCKVCDKAFRRDSHLAQHTVIHTGEKPYKCNECGKTFVQNSSLVMHKVIHTGEKRYKCNECGKVFNHKSNLACHRRLHTGEKPYKCNECGKVFNRKSNLERHHRLHTGKKS

SEQ ID NO: 16361 - protein, 129 aa, Homo sapiens
MREKSFQCNESGKAFNCSSLLKKCQIIHLGEKKYKCDICGKVFNQKRYLAYHHRCHTGEKPYKCNQCGKTFSYKSSLVIHKAIHTGEKPHKCNECGKVFNQKAYLASHHRLHTGEKPYKCEECDKVFSR

SEQ ID NO: 16362 - protein, 590 aa, Homo sapiens
MSDSPAGSNPRTPESSGSGSGGGGKRPAVPAAVSLLPPADPLRQANRLPIRVLKMLSAHTGHLLHPEYLQPLSSTPVSPIELDAKKSPLALLAQTCSQIGKPDPPPSSKLNSVAAAANGLGAEKDPGRSAPGAASAAAALKQLGDSPAEDKSSFKPYSKGSGGGDSRKDSGSSSVSSTSSSSSSSPGDKAGFRVPSAACPPFPPHGAPVSASSSSSSPGGSRGGSPHHSDCKNGGGVGGGELDKKDQEPKPSPEPAAVSRGGGGEPGAHGGAESGASGRKSEPPSALVGAGHVAPVSPYKPGHSVFPLPPSSIGYHGSIVGAYAGYPSQFVPGLDPSKSGLVGGQLSGGLGLPPGKPPSSSPLTGASPPSFLQGLCRDPYCLGGYHGASHLGGSSCSTCSAHDPAGPSLKAGGYPLVYPGHPLQPAALSSSAAQAALPGHPLYTYGFMLQNEPLPHSCNWVAASGPCDKRFATSEELLSHLRTHTALPGAEKLLAAYPGASGLGSAAAAAAAAASCHLHLPPPAAPGSPGSLSLRNPHTLGLSRYHPYGKSHLSTAGGLAVPSLPTAGPYYSPYALYGQRLASASALGYQ

SEQ ID NO: 16363 - protein, 412 aa, Homo sapiens
MTFTFQSEDLKRDCGKKMSHQHVFSLAMEEDVKTADTKKASRILDHEKENTRSICLLEQKRKVVSSNIDVPPARKSSEELDMDKVTAAMVLTSLSTSPLVRSPPVRPNESLSGSWKEGGCVPSSTSSSGYWSWSAPSDQSNPSTPSPPLSADSFKPFRSPAQPDDGIDEAEASNLLFDEPIPRKRKNSMKVMFKCLWKNCGKVLSTAAGIQKHIRTIHLGRVGDSDYSDGEEDFYYTEIKLNTDSVADGLSSLAPVSPSQSLASPPTFPIPDSSRTETPCAKTETKLMTPLSRSAPTTLYLVHTDHAYQATPPVTIPGSAKFTPNGSSFSISWQSPPVTFTGIPVSPTHHPVGTGEQRQHAHTVLSSPPRGTVSLRKPRGEGKKCRKVYGMENRDMWCTACRWKKACQRFLD

SEQ ID NO: 16364 - protein, 300 aa, Homo sapiens
MHSLKKVTFEDVAIDFTQEEWAMMDTSKRKLYRDVMLENISHLVSLGYQISKSYIILQLEQGKELWREGREFLQDQNPDRESALKKKHMISMHPITRKDASTSMTMENSLILEDPFECNDSGEDCTHSSTITQRLLTHSGKKPYVSKQCGKSLRNLFSPKPHKQIHTKGKSYQCNLCEKAYTNCFRLRRHKMTHTGERPYACHLCGKAFTQCSHLRRHEKTHTGERPYKCHQCGKAFIQSFNLRRHERTHLGKKCYECDKSGKAFSQSSGFRGNKIIHTGEKPHACLLCGKAFSLSSDLR

SEQ ID NO: 16365 - protein, 300 aa, Homo sapiens
MHSLEKVTFEDVAIDFTQEEWDMMDTSKRKLYRDVMLENISHLVSLGYQISKSYIILQLEQGKELWREGRVFLQDQNPDRESALKKKHMISMHPIIRKDASTSMTMENSLILEDPFEYNDSGEDCTHSSTITQCLLTHSGKKPCVSKQCGKSLRNLLSPKPRKQIHTKGKSYQCNLCEKAYTNCFYLRRHKMTHTGERPYACHLCGKAFTQCSHLRRHEKTHTGERPYKCHQCGKAFIQSFNLRRHERTHLGQKCYECDKSGKAFSQSSGFRGNKIIHIGEKPHACLLCGKAFSLSSDLR

SEQ ID NO: 16366 - protein, 300 aa, Homo sapiens
MHSLKKVTFEDVAIDFTQEEWAMMDTSKRKLYRDVMLENISHLVSLGYQISKSYIILQLEQGKELWQEGREFLQDQNPDRESALKKTHMISMHPIIRKDAPTSMTMENSLILEDPFECNDSGEDCTHSSTIIQCLLTHSGKKPYVSKQCGKSLSNLLSPKPHKQIHTKGKSYQCNLCEKAYTNCFHLRRPKMTHTGERPYTCHLCRKAFTQCSHLRRHEKTHTGERPYKCHQCGKAFIQSFNLRRHERTHLGEKWYECDNSGKAFSQSSGFRGNKIIHTGEKPHACLLCGKAFSLSSDLR

SEQ ID NO: 16367 - protein, 300 aa, Homo sapiens
MHSLKKLTFEDVAIDFTQEEWAMMDTSKRKLYRDVMLENISHLVSLGYQISKSYIILQLEQGKELWREGRVFLQDQNPNRESALKKTHMISMHPITRKDASTSMTMENSLILEDPFECNDSGEDCTRSSTITQCLLTHSGKKPYVSKQCGKSLRNLLSTEPHKQIHTKGKSYQCNLCEKAYTNCFHLRRHKMTHTGERPYACHLCRKAFTQCSHLRRHEKTHTGQRPYKCHQYGKVFIQSFNLQRHERTHLGKKCYECDKSGKAFSQSSGFRGNKIIHTGEKPHACLLCGKAFSLSSNLR

SEQ ID NO: 16368 - protein, 76 aa, Homo sapiens
MARGQQKIQSQQKNAKKQAGQKKKQGHDQKAAAKAALIYTCTVCRTQMPDPKTFKQHFESKHPKTPLPPELADVQA

SEQ ID NO: 16369 - protein, 371 aa, Homo sapiens
MDMAQEPVTFRDVAIYFSREEWACLEPSQRALYRDVMLDNFSSVAALGFCSPRPDLVSRLEQWEEPWVEDRERPEFQAVQRGPRPGARKSADPKRPCDHPAWAHKKTHVRRERAREGSSFRKGFRLDTDDGQLPRAAPERTDAKPTAFPCQVLTQRCGRRPGRRERRKQRAVELSFICGTCGKALSCHSRLLAHQTVHTGTKAFECPECGQTFRWASNLQRHQKNHTREKPFCCEACGQAFSLKDRLAQHRKVHTEHRPYSCGDCGKAFKQKSNLLRHQLVHTGERPFYCADCGKAFRTKENLSHHQRVHSGEKPYTCAECGKSFRWPKGFSIHRRLHLTKRFYECGHCGKGFRHLGFFTRHQRTHRHGEV

SEQ ID NO: 16370 - protein, 499 aa, Homo sapiens
MKRHEMAAKPPAMCSHFAKDLRPEQYIKNSFQQVILRRYGKCGYQKGCKSVDEHKLHKGGHKGLNRCVTTTQSKIVQCDKYVKVFHKYSNAKRHKIRHTGKNPFKCKECGKSFCMLSQLTQHEIIHTGEKPYKCEECGKAFKKSSNLTNHKIIHTGEKPYKCEECGKAFNQSSTLTRHKIIHTGEKLYKCEECGKAFNRSSNLTKHKIVHTGEKPYKCEECGKAFKQSSNLTNHKKIHTGEKPYKCGECGKAFTLSSHLTTHKRIHTGEKPYKCEECGKAFSVFSTLTKHKIIHTEEKPYKCEECGKAFNRSSHLTNHKVIHTGEKPYKCEECGKAFTKSSTLTYHKVIHTGKKPYKCEECGKAFSIFSILTKHKVIHTEDKPYKCEECGKTFNYSSNFTNHKKIHTGEKPYKCEECGKSFILSSHLTTHKIIHTGEKPYKCKECGKAFNQSSTLMKHKIIHTGEKPYKCEECGKAFNQSPNLTKHKRIHTKEKPYKCK

SEQ ID NO: 16371 - protein, 641 aa, Homo sapiens
MDSVVFEDVAVNFTQEEWALLGPSQKKLYRDVMQETFVNLASIGENWEEKNIEDHKNQGRKLRSHMVERLCERKEGSQFGETISQTPNPKPNKKTFTRVKPYECSVCGKDYMCHSSLNRHMRSHTEHRSYEYHKYGEKSYECKECGKRFSFRSSFRIHERTHTGEKPYKCKQCGKAFSWPSSFQIHERTHTGEKPYECKECGKAFIYHTTFRGHMRMHTGEKPYKCKECGKTFSHPSSFRNHERTHSGEKPYECKQCGKAFRYYQTFQIHERTHTGEKPYQCKQCGKALSCPTSFRSHERIHTGEKPYKCKKCGKAFSFPSSFRKHERIHTGEKPYDCKECGKAFISLPSYRRHMIMHTGNGPYKCKECGKAFDCPSSFQIHERTHTGEKPYECKQCGKAFSCSSSFRMHERTHTGEKPHECKQCGKAFSCSSSVRIHERTHTGEKPYECKQCGKAFSCSSSFRMHERIHTGEKPYECKQCGKAFSFSSSFRMHERTHTGEKPYECKQCGKAFSCSSSFRMHERTHTGEKPYECKQCGKAFSCSSSIRIHERTHTGEKPYECKQCGKAFSCSSSVRMHERTHTGVKPYECKQCDKAFSCSRSFRIHERTHTGEKPYACQQCGKAFKCSRSFRIHERVHSGE

SEQ ID NO: 16372 - protein, 489 aa, Homo sapiens
MKELDPKNDISEDKLSVVGEATGGPTRNGARGPGSEGVWEPGSWPERPRGDAGAEWEPLGIPQGNKLLGGSVPACHELKAFANQGCVLVPPRLDDPTEKGACPPVRRGKNFSSTSDLSKPPMPCEEKKTYDCSECGKAFSRSSSLIKHQRIHTGEKPFECDTCGKHFIERSSLTIHQRVHTGEKPYACGDCGKAFSQRMNLTVHQRTHTGEKPYVCDVCGKAFRKTSSLTQHERIHTGEKPYACGDCGKAFSQNMHLIVHQRTHTGEKPYVCPECGRAFSQNMHLTEHQRTHTGEKPYACKECGKAFNKSSSLTLHQRNHTGEKPYVCGECGKAFSQSSYLIQHQRFHIGVKPFECSECGKAFSKNSSLTQHQRIHTGEKPYECYICKKHFTGRSSLIVHQIVHTGEKPYVCGECGKAFSQSAYLIEHQRIHTGEKPYRCGQCGKSFIKNSSLTVHQRIHTGEKPYRCGECGKTFSRNTNLTRHLRIHT

SEQ ID NO: 16373 - protein, 664 aa, Homo sapiens
MEGFMDSGTQTDAVVVLSLAQAAVLGLVSENELFGATISAEAFYPDLGPELSGAAMGEPEPPGPDVYQLACNGRALEEPAEEEVLEVEAACEKHTRRKTRPPVRLVPKVKFEKVEEEEQEVYEVSVPGDDKDAGPAEAPAEAASGGCDALVQSSAVKMIDLSAFSRKPRTLRHLPRTPRPELNVAPYDPHFPAPARDGFPEPSMALPGPEALPTECGFEPPHLAPLSDPEAPSMESPEPVKPEQGFVWQEASEFEADTAGSTVERHKKAQLDRLDINVQIDDSYLVEAGDRQKRWQCRMCEKSYTSKYNLVTHILGHNGIKPHSCPHCSKLFKQPSHLQTHLLTHQGTRPHKCQVCHKAFTQTSHLKRHMLLHSEVKPYSCHFCGRGFAYPSELKAHEVKHESGRCHVCVECGLDFSTLTQLKRHLASHQGPTLYQCLECDKSFHYRSQLQNHMLKHQNVRPFVCTECGMEFSQIHHLKQHSLTHKGVKEFKCEVCGREFTLQANMKRHMLIHTSVRPYQCHICFKTFVQKQTLKTHMIVHSPVKPFKCKVCGKSFNRMYNLLGHMHLHAGSKPFKCPYCSSKFNLKGNLSRHMKVKHGVMDIGLDSQDPMMELTGTDPSELDGQQEMEDFEENAYSYASVDSSAEASVLTEQAMKEMAYYNVL

SEQ ID NO: 16374 - protein, 761 aa, Homo sapiens
MDSGGGSLGLHTPDSRMAHTMIMQDFVAGMAGTAHIDGDHIVVSVPEAVLVSDVVTDDGITLDHGLAAEVVHGPDIITETDVVTEGVIVPEAVLEADVAIEEDLEEDDGDHILTSELITETVRVPEQVFVADLVTGPNGHLEHVVQDCVSGVDSPTMVSEEVLVTNSDTETVIQAAGGVPGSTVTIKTEDDDDDDVKSTSEDYLMISLDDVGEKLEHMGNTPLKIGSDGSQEDAKEDGFGSEVIKVYIFKAEAEDDVEIGGTEIVTESEYTSGHSVAGVLDQSRMQREKMVYMAVKDSSQEEDDIRDERRVSRRYEDCQASGNTLDSALESRSSTAAQYLQICDGINTNKVLKQKAKKRRRGETRQWQTAVIIGPDGQPLTVYPCHICTKKFKSRGFLKRHMKNHPDHLMRKKYQCTDCDFTTNKKVSFHNHLESHKLINKVDKTHEFTEYTRRYREASPLSSNKLILRDKEPKMHKCKYCDYETAEQGLLNRHLLAVHSKNFPHVCVECGKGFRHPSELKKHMRTHTGEKPYQCQYCIFRCADQSNLKTHIKSKHGNNLPYKCEHCPQAFGDERELQRHLDLFQGHKTHQCPHCDHKSTNSSDLKRHIISVHTKDFPHKCEVCDKGFHRPSELKKHSDIHKGRKIHQCRHCDFKTSDPFILSGHILSVHTKDQPLKCKRCKRGFRQQNELKKHMKTHTGRKIYQCEYCEYSTTDASGFKRHVISIHTKDYPHRCEFCKKGFRRPSEKNQHIMRHHKEALM

SEQ ID NO: 16375 - protein, 430 aa, Homo sapiens
MEEEEMNDGSQMVRSQESLTFQDVAVDFTREEWDQLYPAQKNLYRDVMLENYRNLVALGYQLCKPEVIAQLELEEEWVIERDSLLDTHPDGENRPEIKKSTTSQNISDENQTHEMIMERLAGDSFWYSILGGLWDFDYHPEFNQENHKRYLGQVTLTHKKITQERSLECNKFAENCNLNSNLMQQRIPSIKIPLNSDTQGNSIKHNSDLIYYQGNYVRETPYEYSECGKIFNQHILLTDHIHTAEKPSECGKAFSHTSSLSQPQMLLTGEKPYKCDECGKRFSQRIHLIQHQRIHTGEKPFICNGCGKAFRQHSSFTQHLRIHTGEKPYKCNQCGKAFSRITSLTEHHRLHTGEKPYECGFCGKAFSQRTHLNQHERTHTGEKPYKCNECGKAFSQSAHLNQHRKIHTREKLCEYKCEQTVRHSPSFSST

SEQ ID NO: 16376 - protein, 554 aa, Homo sapiens
MNVMLENYKNLVFLAGIAVSKQDPITSLEQEKEPWNMKICEMVDESPAMCSSFTRDLWPEQDIKDSFQQVILRRHGKCEHENLQLRKGSANVVECKVYKKGYELNQCLTTTQSKIFPCDKYIKVFHKIFNSNRHKTRHTGEKPFKCKKCDESFCMLLHLHQHKRIHIRENSYQCEECDKVFKRFSTLTRHKRVHTGEKPFKCEECGKAFKHSSTLTTHKMIHTGEKPYRCEECGKAFYHSSHLTTHKVIHTGEKPFKCEECGKAFNHPSALTTHKFIHVKEKPYKCEECDKAFNRFSYLTKHKIIHSGEKSYKCEQCGKGFNWSSTLTKHKRIHTGEKPYKCEECGKAFNVSSHLTTHKMIHTGEKPYKCEECGKAFNHSSKLTIHKIIHTGEKPYKCEECGKAFNQSSNLTKHKIIHTGEKLYKCEECGKAFNRSSNLTTHKRIHTGEKPYKCEECGKAFNRSSNLTKHNIIHTGEKSYKCEECGKAFNQSSTLTKHRKIQQGMVAHACNPNTLRGLGEQIARSGVQDQPGQHGKTPSLLKIQKFAGCGGRRL

SEQ ID NO: 16377 - protein, 495 aa, Homo sapiens
MAKRPGPPGSREMGLLTFRDIAIEFSLAEWQCLDHAQQNLYRDVMLENYRNLVSLGIAVSKPDLITCLEQNKEPQNIKRNEMVAKHPVTCSHFTQDLQSEQGIKDSLQKVILRRYGKCGQEDLQVKKCCKSVGECEVHKGGYNYVNQCLSATQNKTFQTHKCVKVFGKFSNSNRHKTRHTGKKHFKCKNDGKSFCMLSRLNQHQIIHTREKSYKCEECGKSFNCSSTLTRHKRIHTGEKPYRCEECGKAFSWSASLTKHKRIHTGEKPYTCEERGKVFSRSTLTNYKRIHTGEKPYTCEECGKAFSRSSTLTNHKRIHTGERPYKCEECGKAFSLSSTLKKHKIVHTGEKLYTCEECGKAFTFSSTLNTHKRIHTGEKPYTCEECGKAFSLPSTFTYHKRTHTGEKPYKCEECGKAFNCSSTLKKHKIIHTGEKLYKCKECGKAFTFSSTLNTHKRIHTGEKPYKCEECDQTFKWHSSLANHKNMHTGEKPYKYE

SEQ ID NO: 16378 - protein, 904 aa, Homo sapiens
MLETYNSLVSLQELVSFEEVAVHFTWEEWQDLDDAQRTLYRDVMLETYSSLVSLGHCITKPEMIFKLEQGAEPWIVEETPNLRLSAVQIIDDLIERSHESHDRFFWQIVITNSNTSTQERVELGKTFNLNSNHVLNLIINNGNSSGMKPGQFNDCQNMLFPIKPGETQSGEKPHVCDITRRSHRHHEHLTQHHKIQTLLQTFQCNEQGKTFNTEAMFFIHKRVHIVQTFGKYNEYEKACNNSAVIVQVITQVGQPTCCRKSDFTKHQQTHTGEKPYECVECEKPSISKSDLMLQCKMPTEEKPYACNWCEKLFSYKSSLIIHQRIHTGEKPYGCNECGKTFRRKSFLTLHERTHTGDKPYKCIECGKTFHCKSLLTLHHRTHSGEKPYQCSECGKTFSQKSYLTIHHRTHTGEKPYACDHCEEAFSHKSRLTVHQRTHTGEKPYECNECGKPFINKSNLRLHQRTHTGEKPYECNECGKTFHRKSFLTIHQWTHTGEKPYECNECGKTFRCKSFLTVHQRTHAGEKPYACNECGKTYSHKSYLTVHHRTHTGEKPYECNECGKSFHCKSFLTIHQRTHAGKKPYECNECEKTFINKLNLGIHKITHTGERPYECNECGKTFRQKSNLSTHQGTHTGEKPYVCGKTFHRKSFLTIHQRTHTGKNRMDVMNVEKLFVRNHTLLYIRELTPGKSPMNVMNVENPFIRRQIFRSIKVFTRGRNPMNVANVEKPCQKSVLTVHHRTHTGEKPYECNECGKTFCHKSNLSTHQGTHSGEKPYECDECRKTFYDKTVLTIHQRTHTGEKPFECKECRKTFSQKSKLFVHHRTHTGEKPFRCNECRKTFSQKSGLSIHQRTHTGEKPYECKECGKTFCQKSHLSRHQQTHIGEKSDVAEAGYVFPQNHSFFP

SEQ ID NO: 16379 - protein, 478 aa, Homo sapiens
MELLTFKDVAIEFSPEEWKCLDTSQQNLYRDVMLENYRNLVSLGVSISNPDLVTSLEQRKEPYNLKIHETAARPPAVCSHFTQNLWTVQGIEDSFHKLIPKGHEKRGHENLRKTCKSINECKVQKGGYNRINQCLLTTQKKTIQSNICVKVFHKFSNSNKDKIRYTGDKTFKCKECGKSFHVLSRLTQHKRIHTGENPYTCEECGKAFNWSSILTKHKRIHAREKFYKCEECGKGFTRSSHLTKHKRIHTGEKPYICEKCGKAFNQSSTLNLHKRIHSAQKYYKCEECGKAFKWSSSLNEHKRIHAGEKPFSCEECGNVFTTSSDFAKHKRIHTGEKPYKCEECGKSFNRSTTLTTHKRIHTGEKPYTCEECGKAFNWSSTLNVHKRIHSGKNPYKCEDCGKAFKVFANLHNHKKIHTGEKPYICKQCGKAFKQSSHLNKHKKIHTVDKPYKCKECGKAFKQYSNLPQHKRTHTGGKF

SEQ ID NO: 16380 - protein, 126 aa, Homo sapiens
MGLLTFRDVAIEFSREEWEHLDSDQKLLYGDVMLENYGNLVSLGLAVSKPDLITFLEQRKEPWNVKSAETVAIQPDIFSHDTQGLLRKKLIEASFQKVILDGYGSCGPQNLNLRKEWESEGKIILW

SEQ ID NO: 16381 - protein, 911 aa, Homo sapiens
MCSHFTQDFLPVQGIEDSFHKLILRRYEKCGHDNLQLRKGCKSMNVCKVQKGVYNGINKCLSNTQSKIFQCNARVKVFSKFANSNKDKTRHTGEKHFKCNECGKSFQKFSDLTQHKGIHAGEKPYTCEERGKDFGWYTDLNQHKKIHTGEKPYKCEECGKAFNRSTNLTAHKRIHNREKAYTGEDRDRAFGWSTNLNEYKKIHTGDKPYKCKECGKAFMHSSHLNKHEKIHTGEKPYKCKECGKVISSSSSFAKHKRIHTGEKPFKCLECGKAFNISTTLTKHRRIHTGEKPYTCEVCGKAFRQSANLYVHRRIHTGEKPYTCGECGKTFRQSANLYVHRRIHTGEKPYKCEDCGKAFGRYTALNQHKKIHTGEKPYKCEECGKAFNSSTNLTAHKRIHTREKPYTCEDRGRAFGLSTNLNEYKKIHTGDKPYKCKECGKAFIHSLHLNKHEKIHTGKKPYKCKQCGKVITSSSSFAKHKRIHTGEKPFECLECGKAFTSSTTLTKHRRIHTGEKPYTCEVCGKAFRQSAILYVHRRIHTGEKPYTCEECGKTFRQSANLYVHRRIHTGEKPYKCEECGKAFGRYTDLNQHKKIHTGEKLYKCEECGKDFVWYTDLNQQKKIYTGEKPYKCEECGKAFAPSTDLNQHTKILTGEQSYKCEECGKAFGWSIALNQHKKIHTGEKPYKCEECGKAFSRSRNLTTHRRVHTREKPYKCEDRGRSFGWSTNLNEYKKIHTGDKLYKCKECGKVFKQSSHLNRHEKIHTGKKPYKCKECGKVITSSSSFAKHKRIHTGEKPFKCLECGKAFTSSTTLTKHRRIHTGEKPYTCEECGKAFRQSAILYVHRRIHTGEKPYTCGECGKTFRQSANLYAHKKIHTGEKPYTCGDCGKTFRQSANLYAHKKIHTGDKTIQV

SEQ ID NO: 16382 - protein, 619 aa, Homo sapiens
MGPLTFMDVAIEFSVEEWQCLDTAQQNLYRNVMLENYRNLVFLGIAVSKPDLITCLEQGKEPWNMERHEMVAKPPGMCCYFAQDLRPEQSIKASLQRIILRKYEKCGHHNLQLKKGYKSVDEYKVHKGSYNGFNQCLTTTQSKIFQCDKYVKDFHKFSNSNRHKTEKNPFKCKECGKSFCVLSHLTQHKRIHTTVNSYKLEECGKAFNVSSTLSQHKRIHTGQKHYKCEECGIAFNKSSHLNTHKIIHTGEKSYKREECGKAFNISSHLTTHKIIHTGENAYKCKECGKAFNQSSTLTRHKIIHAGEKPYICEHCGRAFNQSSNLTKHKRIHTGDKPYKCEECGKAFNVSSTLTQHKRIHTGEKPYKCEECGKAFNVSSTLTQHKRIHTGEKPYKCEECGKAFNTSSHLTTHKRIHTGEKPYKCEECGKAFNQFSQLTTHKIIHTGEKPYKCKECGKAFKRSSNLTEHRIIHTGEKPYKCEECGKAFNLSSHLTTHKKIHTGEKPYKCKECGKAFNQSSTLARHKIIHAGEKPYKCEECGKAFYQYSNLTQHKIIHTGEKPYKCEECGKAFNWSSTLTKHKVIHTGEKPYKCKECGKAFNQCSNLTTHKKIHAVEKSDK

SEQ ID NO: 16383 - protein, 738 aa, Homo sapiens
MGLLTFRDVAIEFSLEEWQCLDTAQKNLYRNVMLENYRNLAFLGIAVSKPDLIICLEKEKEPWNMKRDEMVDEPPGICPHFAQDIWPEQGVEDSFQKVILRRFEKCGHENLQLRKGCKSVDECKVHKEGYNGLNQCFTTTQGKASQCGKYLKVFYKFINLNRYKIRHTRKKPFKCKNCVKSFCMFSHKTQHKSIYTTEKSYKCKECGKTFNWSSTLTNHKKTHTEEKPYKCEEYGKAFNQSSNYTTHKVTHTGEKPYKCEECGKAFSQSSTLTIHKRIHTGEKPCKCEECGKAFSQPSALTIHKRMHIGEKPYKCEECGKAFVWSSTLTRHKRLHSGEKPYKCEECAKAFSQFGHLTTHRIIHTGEKPYKCEECGKAFIWPSTLTKHKRIHTGEKPYKCEECGKAFHRSSNLTKHKIIHTGEKPYKCEECGKAFIWSSNLTEHKKIHTREKPYKCEECSKAFSRSSALTTHKRMHTGEKPYKCEECGKAFSQSSTLTAHKIIHTGEKPYKCEECGKAFILSSTLSKHKRIHTGEKPYKCEECGKTFNQSSNLSTHKIIHTGEKPYKCEECGKAFNRSSNLSTHKIIHTGEKPYKCDECGKSFIWSSTLFKHKRIHTGEKPYKCEECGKAFNHSQILLHIRHKRMHTGEKPYKCEECGKSFNLSSTFIKHKVIHTGVKLYKCEECGKVFFWSSALTRHKKIHAGQQPYKWEKIGKAFNQSSHLTTDKITHIGEKSYKCE

SEQ ID NO: 16384 - protein, 499 aa, Homo sapiens
MRVLTFRDVAVEFSPEEWECLDSAQQRLYRDVMLENYGNLFSLGLAIFKPDLITYLEQRKEPWNARRQKTVAKHPAGSLHFTAEILLEHDINDSFQKVILRKSGSCDLNTLRLKKDYQRVGNCKGQKSSYNGIHQCLSATRSKTCQYNKCGKAFGLCSIFTEHKKIFSREKCYKCEECGKDCRLSDFTIQKRIHTADRSYKCEECGKACKKFSNLTEHNRVHTGKKPYKCEECGKTFTCSSALTKHKRNHTGDRPYKCEECHKAFRCCSDLTKHKRIHTGEKPYKCKECHKAFRCCSDLTKHKRIHTGEKPYKCNECGKAFMWISALSQHNRIHTGEKPYICEECGKAFTYSSTLISHKRIHMELRPYKCEECGKTFKWFSDLTNHKRIHTGEKPYKCEECGKSFTCSSNLIKHKRIHMEVRPYKCEECGKTFKWFPDLTNHKRIHTGEKPYKCEECGKTFTCSSSLIKHKRSHTGDRPTSAKNVAKPLGGSQTLLNIR

SEQ ID NO: 16385 - protein, 1252 aa, Homo sapiens
MPGAPGSLEMGPLTFRDVTIEFSLEEWQCLDTVQQNLYRDVMLENYRNLVFLGMAVFKPDLITCLKQGKEPWNMKRHEMVTKPPVMRSHFTQDLWPDQSTKDSFQEVILRTYARCGHKNLRLRKDCKSANEGKMHKEGYNKLNQCRTATQRKIFQCNKHMKVFHKYSNRNKVRHTKKKTFKCIKCSKSFFMLSCLIRHKRIHIRQNIYKCEERGKAFKSFSTLTKHKIIHTEDKPYKYKKCGNAFKFSSTFTKHKRIHTGETPFRCEECGKAFNQSSNLTDHKRIHTGEKTYKCEECGKAFKGSSNFNAHKVIHTAEKPYKCEDCGKTFNHFSALRKHKIIHTGKKPYKREECGKAFSQSSTLRKHEIIHTGEKPYKCEECGKAFKWSSKLTVHKVVHTGEKPYKCEECGKAFSQFSTLKKHKIIHTGKKPYKCEECGKAFNSSSTLMKHKIIHTGEKPYKCEECGKAFRQSSHLTRHKAIHTGEKPYKCEECGKAFNHFSDLRRHKIIHTGKKPYKCEECGKAFSQSSTLRNHQIIHTGEKPYKCEECGKAFKWSSKLTVHKVIHTGEKPCKCEECGKAFKHFSALRKHKVIHTREKLYKCEECGKAFNNSSILAKHKIIHTGKKPYKCEECGKAFRQSSHLTRHKAIHTGEKPYKCEECGKAFSHFSALRRHKIIHTGKKPYKCEECGKAFSHFSALRRHKIIHTGEKPYKCEECGKAFKWSSKLTVHKVIHTAEKPCKCEECGKSFKHFSALRKHKVIHTREKLYKCEECVKAFNSFSALMKHKVIHTGEKPYKCEECGKAFKWSSKLTVHKVIHTGEKPCKCEECGKAFKHFSALRKHKVIHTGKKPYKCEECGKAFSQSSSLRKHEIIHSGEKPYKCEECGKAFKWLSKLTVHKVIHTAEKPCKCEECGKAFKHFSALRKHKIIHTGKKPYKCEECGKAFNDSSTLMKHKIIHTGKKPYKCAECGKAFKQSSHLTRHKAIHTGEKPYKCEECGKDFNNSSTLKKHKLIHTREKLYKCEECVKAFNNFSALMKHKIIHTGEKPYKCEECGKAFKWSSKLTEHKVIHTGEKPCKCEECDKAFKHFSALRKHKVIHTGKKPYQCDECGKAFNNSSTLTKHKIIHTGEKPYKCEECGKAFSQSSILTKHKIIHSVEKPYKCEECGKAFNQSSHLTRHKTIHTGEKPYKCEECGKAFIQCSYLIRHKTIHTREKPTNVKKVPKLLSNPHTLLDKTIHTGEKPYKCEECAKAF

SEQ ID NO: 16386 - protein, 503 aa, Homo sapiens
MGALTFRDVAIEFSLEEWQCLDTEQQNLYRNVMLDNYRNLVFLGIAVSKPDLITCLEQEKEPWNLKTHDMVAKPPVICSHIAQDLWPEQGIKDYFQEVILRQYKKCRHENLLLRKGCKNVDEFKMHKKGYNRHNQCLTTSHSKIFQCDKYVKVFHKFSNSNRHKIRHTSKKPFKCKECGKLFCILSHLAQHKKIHTGEKSYKCEEYGKAFNESSNCTTHKRITEKKPYKCKECGKAFNWFSHFTTHKRIHTGEKPYQCEKCGKFFNQSTNLTTHKRIHTGEKPYKCEECGKAFNQSSNLTEHKKIHTKEQPYKCEKCGKAFKWSSTLTKHKRIHNGEKPYKCEECGKAFNRSSTLNRHKITHTGGKPYKYKECGKAFNQSSTLTIHKIIHTVEKFYKCEECGKAFSRISHLTTHKRIHTGEKPYKCEECGRAFNQSSTLTTHKRIHTGEKPYECEECGKAFNRSSTLTTHKIIHSGEKIYKCKECGKAFRRFSHLTRHKTIHT

SEQ ID NO: 16387 - protein, 585 aa, Homo sapiens
MELLTFRDVAIEFSPEEWKCLDPAQQNLYRDVMLENYRNLISLGVAISNPDLVIYLEQRKEPYKVKIHETVAKHPAVCSHFTQDFLPVQGIEDSFHKLILRRYEKCGHENLELRKSCKRKVQKGGYNEFNQCLSTIQSKIFQCNVHVKVFSTFSNSNQRRIRHTGEKHFKECGKSFQKFSDLTQHQGIHAGEKPYTCEECGKDFKWYLIFNEYEIIHTGEKPFTCEECGNIFTTSSNFAKHKVHTGEKSYKYEECGKAFNRSSTLTKHKRIHAEEKPFTCEECGKIITSSSNVAKHKKIHTGEKLYKCQECGKVFNRSTTLTKHNRIHTGEKPYTCEECGKAFSRSSVLNEHKRIHTGEKPYKCEQCGKAFRQSATLNKHKSIHTGEKPYTCEECGKAFSRFTTLNEHKRIHTGERPHKCEECGKAFGWSTDLNKHKIIHTGEKPYKCEECGKAFGWSAYLSKHKKIHTGEKPYRCEECGKAFLCSRALNKHKTIHTGEKPYECEECGKAFGWSTYLSKHKKIHTGEKPYRCEECGKAFRRSRVLNKYKTIHTGDKTPKCKGCGKAFKWSSYLNQHNKIYTGEKL

SEQ ID NO: 16388 - protein, 412 aa, Homo sapiens
MAKRPGPPGSREMGLLTFRDIAIEFSLAEWQCLDHAQQNLYRDVMLENYRNLFSLGMTVSKPDLIACLEQNKEPQNIKRNEMAAKHPVTCSHFNQDLQPEQSIKDSLQKVIPRTYGKCGHENLQLKKCCKRVDECEVHKGGYNDLNQCLSNTQNKIFQTHKCVKVFSKFSNSNRHNARYTGKKHLKCKKYGKSFCMFSHLNQHQIIHTKEKSYKCEECGKSFNHSSSGTTHKRILTGEKPYRCEECGKAFRWPSNLTRHKRIHTGEKPYACEECGQAFRRSSTLTNHKRIHTGERPYKCEECGKAFSVSSALIYHKRIHTGEKPYTCEECGKAFNCSSTLKTHKIIHTGEKPYTCEECGRTFNCSSTVKAHKRIHTGEKPYKCEECDKAFKWHSSLAKHKIIHTGEKPYKCK

SEQ ID NO: 16389 - protein, 536 aa, Homo sapiens
MGPLQFRDVAIEFSLEEWHCLDTAQRNLYRNVMLENYRNLVFLGIVVSKPDLITCLEQGKKPLTMKKHEMVANPSVTCSHFARDLWPEQSIKDSFQKVTLRRYENYGHDNLQFKKGCESVDECKVHKRGYNGLNQYLTTTQSKIFQCDKYVKVIHKFSNSNRHKIRHTGKKPFKCIECGKAFNQSSTLTTHKKIHTGEKPFKCEECGKAFNWSSHLTTHKRIHTGEKRYKCEDCGKAFSRFSYLTAHKIIHSGEKPYKCEECGKAFKRSSNLTTHKIIHTGEKPYKCEECGKAFKRSSILTAHKIIHSGEKPYKCEECGKAFKHPSVLTTHKRIHTGEKPYKCEECGRAFKYFSSLTTHKIIHSGEKPYKCEECGKAFNWSSHLTTHKRIHTGEKPYKCEECGEAFKYSSSLTTHKIIHTGQQPFKCEECGKAFKCFSILTTHKRIHTGEKPYKCEECGKAFNSSSHLTAHKRIHTGEKPYKCERCGKAFKRSFILTRHKRIHTGEKPYKCEECGKGFKCPSTLTTHKVIHTGEKL

SEQ ID NO: 16390 - protein, 644 aa, Homo sapiens
MEIPAPEPEKTALSSQDPALSLKENLEDISGWGLPEARSKESVSFKDVAVDFTQEEWGQLDSPQRALYRDVMLENYQNLLALGPPLHKPDVISHLERGEEPWSMQREVPRGPCPEWELKAVPSQQQGICKEEPAQEPIMERPLGGAQAWGRQAGALQRSQAAPWAPAPAMVWDVPVEEFPLRCPLFAQQRVPEGGPLLDTRKNVQATEGRTKAPARLCAGENASTPSEPEKFPQVRRQRGAGAGEGEFVCGECGKAFRQSSSLTLHRRWHSREKAYKCDECGKAFTWSTNLLEHRRIHTGEKPFFCGECGKAFSCHSSLNVHQRIHTGERPYKCSACEKAFSCSSLLSMHLRVHTGEKPYRCGECGKAFNQRTHLTRHHRIHTGEKPYQCGSCGKAFTCHSSLTVHEKIHSGDKPFKCSDCEKAFNSRSRLTLHQRTHTGEKPFKCADCGKGFSCHAYLLVHRRIHSGEKPFKCNECGKAFSSHAYLIVHRRIHTGEKPFDCSQCWKAFSCHSSLIVHQRIHTGEKPYKCSECGRAFSQNHCLIKHQKIHSGEKSFKCEKCGEMFNWSSHLTEHQRLHSEGKPLAIQFNKHLLSTYYVPGSLLGAGDAGLRDVDPIDALDVAKLLCVVPPRAGRNFSLGSKPRN

SEQ ID NO: 16391 - protein, 193 aa, Homo sapiens
MAQASLLACEGLAGVSLVPTAASKKMMLSQIASKQAENGERAGSPDVLRCSSQGHRKDSDKSRSRKDDDSLSEASHSKKTVKKVVVVEQNGSFQVKIPKNFVCEHCFGAFRSSYHLKRHILIHTGEKPFECDICDMRFIQKYHLERHKRVHSGEKPYQCERCHQCFSRTDRLLRHKRMCQGCQSKTSDGQFSL

SEQ ID NO: 16392 - protein, 644 aa, Homo sapiens
MAEAVAAPISPWTMAATIQAMERKIESQAARLLSLEGRTGMAEKKLADCEKTAVEFGNQLEGKWAVLGTLLQEYGLLQRRLENVENLLRNRNFWILRLPPGSKGESPKEWGKLEDWQKELYKHVMRGNYETLVSLDYAISKPEVLSQIEQGKEPCNWRRPGPKIPDVPVDPSPGSGPPVPAPDLLMQIKQEGELQLQEQQALGVEAWAAGQPDIGEEPWGLSQLDSGAGDISTDATSGVHSNFSTTIPPTSWQTDLPPHHPSSACSDGTLKLNTAASTEDVKIVIKTEVQEEEVVATPVHPTDLEAHGTLFGPGQATRFFPSPAQEGAWESQGSSFPSQDPVLGLREPARPERDMGELSPAVAQEETPPGDWLFGGVRWGWNFRCKPPVGLNPRTGPEGLPYSSPDNGEAILDPSQAPRPFNEPCKYPGRTKGFGHKPGLKKHPAAPPGGRPFTCATCGKSFQLQVSLSAHQRSCGAPDGSGPGTGGGGSGSGGGGGGSGGGSARDGSALRCGECGRCFTRPAHLIRHRMLHTGERPFPCTECEKRFTERSKLIDHYRTHTGVRPFTCTVCGKSFIRKDHLRKHQRNHAAGAKTPARGQPLPTPPAPPDPFKSPASKGPLASTDLVTDWTCGLSVLGPTDGGDM

SEQ ID NO: 16393 - protein, 191 aa, Homo sapiens
MTDPSLGLTVPMAPPLAPLPPRDPNGAGSEWRKPGAVSFADVAVYFSREEWGCLRPAQRALYRDVMRETYGHLGALGESPTCLPGPCASTGPAAPLGAACGVGGPGAGQAASSQRGVCVLLPQESEAASRRSSPGWRRRPNCGIRLPRIRRWRSVRQKRTQQIPETRKRKDKGKGREPWRSPTLWPPGLLG

SEQ ID NO: 16394 - protein, 778 aa, Homo sapiens
MNLTEDCMVFEDVAIYFSQEEWGILNDAQRHLHSNVMLENFALLSSVGCWHGAKDEEVPSKQCVSVRVLQVTIPKPALSTLKAQPCKMCSSILKDILHLAEHDGTHPEQGLYTCAAEHDLHQKEQIREKLTRSDEWRPSFVNHSAHVGERNFTCTQGGKDFTASSDLLQQQVLNSGWKLYRDTQDGEAFQGEQNDFNSSQGGKDFCHQHGLFEHQKTHNGERPYEFSECGELFRYNSNLIKYQQNHAGERPYEGTEYGKTFIRKSNLVQHQKIHSEGFLSKRSDPIEHQEILSRPTPYECTQCGKAFLTQAHLVGHQKTHTGEQPYECNKCGKFFMYNSKLIRHQKVHTGERRYECSECGKLFMDSFTLGRHQRVHTGERPFECSICGKFFSHRSTLNMHQRVHAGKRLYKCSECGKAFSLKHNVVQHLKIHTGERPYECTECEKAFVRKSHLVQHQKIHTDAFSKRSDLIQHKRIDIRPRPYTCSECGKAFLTQAHLVGHQKIHTGERPYECTQCAKAFVRKSHLVQHEKIHTDAFSKRSDLIQHKRIDLRPRPYVCSECGKAFLTQAHLDGHQKIQTGERRYECNECGKFFLDSYKLVIHQRIHTGEKPYKCSKCGKFFRYRCTLSRHQKVHTGERPYECSECGKFFRDSYKLIIHQRVHTGEKPYECSNCGKFLRYRSTFIKHHKVCTGEKPHECSKCRELFRTKSSLIIHQQSHTGESPFKLRECGKDFNKCNTGQRQKTHTGERSYECGESSKVFKYNSSLIKHQIIHTGKRP

SEQ ID NO: 16395 - protein, 723 aa, Homo sapiens
MSLLKERKPKKPHYIPRPPGKPFKYKCFQCPFTCNEKSHLFNHMKYGLCKNSITLVSEQDRVPKCPKSNSLDPKQTNQPDATAKPASSKSVANGLSAFDSKLQHSSAREDIKENLELQARGTHRCLGQKPALHRASPCKSPAPEAALGAQPALEGAARPSAFVPVGEHRLKGPDNAEAPETLALHNPTAKAVSFHTKSAFHTPGYPWKAGSPFLPPEFPHKISSTKGLGAISPYMHPTIPEYPPHFYTEHGLATIYSPYLLAGSSPECDAPLLSVYGTQDPRHFLPHPGPIPKHLAPSPATYDHYRFFQQYPSNLPIPYGFYRPESAFSSYGLRLPPVTGLTRDQSSHLLEEATLVYPASSPSRLNPSDPNRKHVEFESPIPEAKDSSKAGQRDTEGSKMSPRAGSAATGSPGRPSPTDFMQTSQTCEGLYDLSNKAASSALGRLYPPEQSLTAFRPVKKSTECLPAQAAETTAESPVSLNVVNGDPPAPTGSASLVSEAAPSSPDDSSGMGPLNLSKKSEINLAATHEPTYQGSPQAETASFSELQDLPLNLSVKDPCNTQAPRPAFPGRPRAAEPAAAVPQKTGTEGSEDGPSHPETKPGSLDGDGAPPTGPGEEAPDACAVDSSEEQKQTAAVALCQLAAYSPRNIRVGDGDAAAPEPACRQDTPTLSSMESQEAQCDLRPKGQKRTSLRDAGKSQQGAKKAKLQDTARVFTLRRRARVS

SEQ ID NO: 16396 - protein, 296 aa, Homo sapiens
MYFSQEEWELLDPTQKALYNDVMQENYETVISLALFVLPKPKVISCLEQGEEPWVQVSPEFKDSAGKSPTGLKLKNDTENHQPVSLSDLEIQASAGVISKKAKVKVPQKTAGKENHFDMHRVGKWHQDFPVKKRKKLSTWKQELLKLMDRHKKDCAREKPFKCQECGKTFRVSSDLIKHQRIHTEEKPYKCQQCDKRFRWSSDLNKHLTTHQGIKPYKCSWCGKSFSQNTNLHTHQRTHTGEKPFTCHECGKKFSQNSHLIKHRRTHTGEQPYTCSICRRNFSRRSSLLRHQKLHL

SEQ ID NO: 16397 - protein, 510 aa, Homo sapiens
MAMRELNADSCSSPQMGAMWETSGSVKENSSQSKKYSTKIENLGPESACRHFWSFRYHEATGPLETISQLQKLCHQWLRPEIHSKEQILEMLVLEQFLSILPKETQNWVQKHHPQNVKQALVLVEFLQREPDGTKNEVTAHELGKEAVLLGGTAVAPGFKWKPAEPQPMGVFQKEYWNTYRVLQEQLGWNTHKETQPVYERAVHDQQMLALSEQKRIKHWKMASKLILPESLSLLTFEDVAVYFSEEEWQLLNPLEKTLYNDVMQDIYETVISLGLKLKNDTGNDHPISVSTSEIQTSGCEVSKKTRMKIAQKTMGRENPGDTHSVQKWHRAFPRKKRKKPATCKQELPKLMDLHGKGPTGEKPFKCQECGKSFRVSSDLIKHHRIHTGEKPYKCQQCDRRFRWSSDLNKHFMTHQGIKPYRCSWCGKSFSHNTNLHTHQRIHTGEKPFKCDECGKRFIQNSHLIKHQRTHTGEQPYTCSLCKRNFSRRSSLLRHQKLHRRREACLVSPN

SEQ ID NO: 16398 - protein, 570 aa, Homo sapiens
MESLGLHTVTLSDGTTAYVQQAVKGEKLLEGQVIQLEDGTTAYIHQVTVQKEALSFEDGQPVQLEDGSMAYIHRTPREGYDPSTLEAVQLEDGSTAYIHHPVAVPSESTILAVQTEVGLEDLAAEDDEGFSADAVVALEQYASKVLHDSQIPRNGKGQQVGDRAFRCGYKGCGRLYTTAHHLKVHERAHTGDRPYRCDFPSCGKAFATGYGLKSHVRTHTGEKPYKCPEELCSKAFKTSGDLQKHVRTHTGERPFQCPFEGCGRSFTTSNIRKVHVRTHTGERPYTCPEPHCGRGFTSATNYKNHVRIHTGEKPYVCTVPGCGKRFTEYSSLYKHHVVHTHCKPYTCSTCGKTYRQTSTLAMHKRSAHGELEATEESEQALYEQQQLEAASAAEESPPPKRPRIAYLSEVKEERDDIPAQVAMVTEEDGAPQVALITQDGAQQVSLSPEDLQALGSAISMVTQHGSTTLTIPSPDADLATSGTHTVTMVSADGTQTQPVTIITSGAVVAEDSSVASLRHQQVALLATANGTHIAVQLEEQQTLEEAINVATAAMQQGAVTLETTVSESGC

SEQ ID NO: 16399 - protein, 746 aa, Homo sapiens
MAFSQGLLTFRDVAIEFSQEEWKCLDPAQRTLYRDVMLENYRNLVSLDISSKCTMKEFLSTAQGNREVFHAGTLQIHESHHNGDFCYQDVDKDIHDYEFQWQEDERNGHEAPMTKIKKLTGITERYDQSHARNKPIKDQLGSSFHSHLPEMHIFQTEEKIDNQVVKSVHDASLVSTAQRISCRPKTHISNNHGNNFWNSSLLTQKQEVHMREKSFQCNESGKAFNYSSLLRKHQIIHLADKYKCDVCGKLFNQKRNLACHRRCHTGENPYKCNECGKTFSQTSSLTCHRRLHTGEKPYKCEECDKAFHFKSILERHRIIHTEEKPYKCNECGKTFRQKSILTRHHRLHTGEKPYKCNECGKTFSHKSSLTCHHRLHTGEKPYKCNECGKTFSHKSSLTCHRRLHTGEKPYKCEECDKAYSFRSNFEIHRKIHTEDNAYKCNECGKTFSRTSSLTCHRRRHTGEQPYKCEECDKAFRFKSNLERHRRIHTGEKPYKCNECGKTFSRKSYLTCHHRLHTGEKAYKCNECGKTFSWKSSLTCHRRLHSGEKPYKCKECGKTFNQQLTLKRHRRLHSGENPYKCEDSDKAYSFKSNLEIHQKIHTEENPYKCNECGKTFSRTSSLTCHRRLHTGEKPYKCEECDKAFRVKSNLEGHRRIHTGEKPYKCNECGKTFSRKSYFICHHRLHTGEKPYKCNECGKNFSQKSSLICHHRLHTGEKPYKCNECGKTFSQKSNLTCHRRLHTGEKQV

SEQ ID NO: 16400 - protein, 394 aa, Homo sapiens
MDPVACEDVAVNFTQEEWALLDISQRKLYREVMLETFRNLTSIGKKWKDQNIEYEYQNPRRNFRSLIEGNVNEIKEDSHCGETFTQVPDDRLNFQEKKASPEAKSCDNFVCGEVGIGNSSFNMNIRGDIGHKAYEYQDYAPKPYKCQQPKKAFRYHPSFRTQERNHTGEKPYACKECGKTFISHSGIRRRMVMHSGDGPYKCKFCGKAVHCLRLYLIHERTHTGEKPYECKQCVKSFSYSATHRIHERTHTGEKPYECQQCGKAFHSSSSFQAHKRTHTGGKPYECKQCGKSFSWCHSFQIHERTHTGEKPCECSKCNKAFRSYRSYLRHKRSHTGEKPYQCKECRKAFTYPSSLRRHERTHSAKKPYECKQCGKALSYKFSNTPKNALWRKTL

SEQ ID NO: 16401 - protein, 408 aa, Homo sapiens
MAPPLAPLPPRDPNGAGPEWREPGAVSFADVAVYFCREEWGCLRPAQRALYRDVMRETYGHLSALGIGGNKPALISWVEEEAELWGPAAQDPEVAKCQTQTDPADSRNKKKERQREGTGALEKPDPVAAGSPGLKSPQAPSAGPPYGWEQLSKAPHRGRPSLCAHPPVPRADQRHGCYVCGKSFAWRSTLVEHVYSHTGEKPFHCTDCGKGFGHASSLSKHRAIHRGERPHRCLECGRAFTQRSALTSHLRVHTGEKPYGCADCGRRFSQSSALYQHRRVHSGETPFPCPDCGRAFAYPSDLRRHVRTHTGEKPYPCPDCGRCFRQSSEMAAHRRTHSGEKPYPCPQCGRRFGQKSAVAKHQWVHRPGAGGHRGRVAGRLSVTLTPGHGDLDPPVGFQLYPEIFQECG

SEQ ID NO: 16402 - protein, 523 aa, Homo sapiens
MALPQGLLTFRDVAIEFSQEEWKCLDPAQRTLYRDVMLENYRNLVSLDISSKCMMKEFSSTAQGNREVFHAGTSQRHESHHNGDFCFQDIDKDIHDIEFQWQEDERNGHEALMTKIKKLTGSTERYDQNYAGNKPVKYQLGFSFHSHLPELHIFHTEEKIDNQVVKSIHDASLVSTAQRISCRPETHISNDYGNNFLNSSLFTQKQEVHMREKSFQCNDSGKAYNCSSLLRKHQLIHLGEKQYKCDICGKVFNSKRYVARHRRCHTGEKPYKCNECGKTFSQTYYLTCHRRLHTGEKPYKCEECDKAFHFKSKLQIHRRIHTGEKPYKCNECGKTFSQKSYLTCHRRLHTGEKPYKCNECGKTFSRKSHFTCHHRVHTGEKPYKCNECSKTFSHKSSLTYHRRLHTEEKPYKCNECGKTFNQQLTLNICRLHSGEKPYKCEECDKAYSFKSNLEIHQKIHTEENPYKCNECGKTFSRTSSLTYHHRLHTGQKPYKCEDCDEAFSFKSNLERHRRIYTGEKLHV

SEQ ID NO: 16403 - protein, 468 aa, Homo sapiens
MAQLRRGHLTFRDVAIEFSQEEWKCLDPVQKALYRDVMLENYRNLVSLGICLPDLSIISMMKQRTEPWTVENEMKVAKNPDRWEGIKDINTGRSCAVRSKAGNKPITNQLGLTFQLPLPELEIFQGEGKIYECNQVQKFISHSSSVSPLQRIYSGVKTHIFNKHRNDFVDFPLLSQEQKAHIRRKPYECNEQGKVFRVSSSLPNHQVIHTADKPNRCHECGKTVRDKSGLAEHWRIRTGEKPYKCKECGKLFNRIAYLARHEKVHTGESPYKCNECGKVFSRITYLVRHQKIHTREKPHKCNKCGKVYSSSSYLAQHWRIHTGEKLYKCNKCGKEFSGHSSLTTHLLIHTGEKPYKCKECDKAFRHKFSLTVHQRNHNGEKPYKCHECGKVFTQVSHLARHQKIHTGEKPYKCNECGKVFTQNSHLANHQRIHTGEKPYKCHVCGKVFRHSSWFVQHQRSVHERVLTN

SEQ ID NO: 16404 - protein, 540 aa, Homo sapiens
MEREALPWGLEPQDVQSSDEMRSPEGYLRGNMSENEEEEISQQEGSGDYEVEEIPFGLEPQSPGFEPQSPEFEPQSPRFEPESPGFESRSPGLVPPSPEFAPRSPESDSQSPEFESQSPRYEPQSPGYEPRSPGYEPRSPGYESESSRYESQNTELKTQSPEFEAQSSKFQEGAEMLLNPEEKSPLNISVGVHPLDSFTQGFGEQPTGDLPIGPPFEMPTGALLSTPQFEMLQNPLGLTGALRGPGRRGGRARGGQGPRPNICGICGKSFGRGSTLIQHQRIHTGEKPYKCEVCSKAFSQSSDLIKHQRTHTGERPYKCPRCGKAFADSSYLLRHQRTHSGQKPYKCPHCGKAFGDSSYLLRHQRTHSHERPYSCTECGKCYSQNSSLRSHQRVHTGQRPFSCGICGKSFSQRSALIPHARSHAREKPFKCPECGKRFGQSSVLAIHARTHLPGRTYSCPDCGKTFNRSSTLIQHQRSHTGERPYRCAVCGKGFCRSSTLLQHHRVHSGERPYKCDDCGKAFSQSSDLIRHQRTHAAGRR

SEQ ID NO: 16405 - protein, 545 aa, Homo sapiens
MDCVIFEEVAVNFTPEEWALLDHAQRSLYRDVMLETCRNLASLDCYIYVRTSGSSSQRDVFGNGISNDEEIVKFTGSDSWSIFGENWRFDNTGDQHQIPQRHLRSQLGRLCESNEGHQCGETLSQTANLLVHKSYPTEAKPSECTKCGKAFENRQRSHTGQRPCKECGQACSCLSCQSPPMKTQTVEKPCNCQDSRTASVTYVKSLSSKKSYECQKCGKAFICPSSFRGHVNSHHGQKTHACKVCGKTFMYYSYLTRHVRTHTGEKPYECKECGKAFSCPSYFREHVRTHTGEKPYECKHCGKSFSCYSSFRDHVRTHTGEKPCQCKHCGKAFTCYSSLREHGRTHSGEKPYECKECGKAFRYPSSLRAHMRMHTGEKPYVCKQCGKAFGCPTYFRRHVKTHSGVKPYQCKECGKAYSFSSSLRIHVRTHTGEKPFECKHCGKAFSCHSSLREHVRTHSGEKPYECNQCGKAFSHAQYFQKHVRSHSGVKPYECTECGKAYSCSSSLRVHVRTHTGERPYECKQCGKTFRYLASLQAHVRTHAGA

SEQ ID NO: 16406 - protein, 691 aa, Homo sapiens
MMAENNLKMLKIQQCVVANKLPRNRPYVCNICFKHFETPSKLARHYLIHTGQKPFECDVCHKTFRQLVHLERHQLTHSLPFKCSICQRHFKNLKTFVKHQQLHNETYQNNVKQVRRLLEAKQEKSMYGVYNTFTTEERWALHPCSKSDPMYSMKRRKNIHACTICGKMFPSQSKLDRHVLIHTGQRPFKCVLCTKSFRQSTHLKIHQLTHSEERPFQCCFCQKGFKIQSKLLKHKQIHTRNKAFRALLLKKRRTESRPLPNKLNANQGGFENGEIGESEENNPLDVHSIYIVPFQCPKCEKCFESEQILNEHSCFAARSGKIPSRFKRSYNYKTIVKKILAKLKRARSKKLDNFQSEKKVFKKSFLRNCDLISGEQSSEQTQRTFVGSLGKHGTYKTIGNRKKKTLTLPFSWQNMGKNLKGILTTENILSIDNSVNKKDLSICGSSGEEFFNNCEVLQCGFSVPRENIRTRHKICPCDKCEKVFPSISKLKRHYLIHTGQRPFGCNICGKSFRQSAHLKRHEQTHNEKSPYASLCQVEFGNFNNLSNHSGNNVNYNASQQCQAPGVQKYEVSESDQMSGVKAESQDFIPGSTGQPCLPNVLLESEQSNPFCSYSEHQEKNDVFLYRCSVCAKSFRSPSKLERHYLIHAGQKPFECSVCGKTFRQAPHWKRHQLTHFKERPQGKVVALDSVM

SEQ ID NO: 16407 - protein, 317 aa, Homo sapiens
MPGEQQAEEEEEEEMQEEMVLLVKGEEDEGEEKYEVVKLKIPMDNKEVPGEAPAPSADPARPHACPDCGRAFARRSTLAKHARTHTGERPFGCTECGRRFSQKSALTKHGRTHTGERPYECPECDKRFSAASNLRQHRRRHTGEKPYACAHCGRRFAQSSNYAQHLRVHTGEKPYACPDCGRAFGGSSCLARHRRTHTGERPYACADCGTRFAQSSALAKHRRVHTGEKPHRCAVCGRRFGHRSNLAEHARTHTGERPYPCAECGRRFRLSSHFIRHRRAHMRRRLYICAGCGRDFKLPPGATAATATERCPECEGS

SEQ ID NO: 16408 - protein, 489 aa, Homo sapiens
MAAAEPMGPAQVPMNSEVIVDPIQGQVNFEDVFVYFSQEEWVLLDEAQRLLYRDVMLENFALMASLGHTSFMSHIVASLVMGSEPWVPDWVDMTLAVATETPGGSDPGCWHGMEDEEIPFEQSFSIGMSQIRIPKGGPSTQKAYPCGTCGLVLKDILHLAEHQETHPGQKPYMCVLCGKQFCFSANLHQHQKQHSGEKPFRSDKSRPFLLNNCAVQSMEMSFVTGEACKDFLASSSIFEHHAPHNEWKPHSNTKCEEASHCGKRHYKCSECGKTFSRKDSLVQHQRVHTGERPYECGECGKTFSRKPILAQHQRIHTGEMPYECGICGKVFNHSSNLIVHQRVHTGARPYKCSECGKAYSHKSTLVQHESIHTGERPYECSECGKYFGHKYRLIKHWSVHTGARPYECIACGKFFSQSSDLIAHQRVHNGEKPYVCSECGKAFSHKHVLVQHHRIHTGERPYKCSECGKAFRQRASLIRHWKIHTGERP

SEQ ID NO: 16409 - protein, 442 aa, Homo sapiens
MAAATLRDPAQQGYVTFEDVAVYFSQEEWRLLDDAQRLLYRNVMLENFTLLASLGLASSKTHEITQLESWEEPFMPAWEVVTSAILRGSWQGAKAEAAAEQSASVEVPSSNVQQHQKQHCGEKPLKRQEGRVPVLRSCRVHLSEKSLQSREVGKDLLTSSGVLKHQVTHTGEKSHRSSKSREAFHAGKRHYKCSECGKAFGQKYLLVQHQRLHTGEKPYECSECGKLFSHKSNLFIHQIVHTGERPYGCSDCGKSFSRNADLIQHQRVHTGEKPFTCSECGKAFRHNSTLVQHHRIHTGVRPYECSECGKLFSFNSSLMKHQRVHTGERPYKCSECGKFYSHKSSLINHWRVHTGERPYECSECGKFFSQSSSLMQHRKVHTGEKPFKCNECGRFFSENSSLVKHQRVHTGAKPYECRECGKFFRHSSSLVKHRRIHTGEIQ

SEQ ID NO: 16410 - protein, 483 aa, Homo sapiens
MWLGTSGKSGLPGHCLENPLQECHPAQLEEWALKGISRPSVISQPEQKEEPWVLPLQNFEARKIPRESHTDCEHQVAKLNQDNSETAEQCGTSSERTNKDLSHTLSWGGNWEQGLELEGQHGTLPGEGQLESFSQERDLNKLLDGYVGEKPMCAECGKSFNQSSYLIRHLRTHTGERPYTCIECGKGFKQSSDLVTHRRTHTGEKPYQCKGCEKKFSDSSTLIKHQRTHTGERPYECPECGKTFGRKPHLIMHQRTHTGEKPYACLECHKSFSRSSNFITHQRTHTGVKPYRCNDCGESFSQSSDLIKHQRTHTGERPFKCPECGKGFRDSSHFVAHMSTHSGERPFSCPDCHKSFSQSSHLVTHQRTHTGERPFKCENCGKGFADSSALIKHQRIHTGERPYKCGECGKSFNQSSHFITHQRIHLGDRPYRCPECGKTFNQRSHFLTHQRTHTGEKPFHCSKCNKSFRQKAHLLCHQNTHLI

SEQ ID NO: 16411 - protein, 537 aa, Homo sapiens
MESGLAGNGTGAGLVMKVKQEKPERLLQTLAPQAMLVEKDKENIFQQHRGLPPRQTMGRPRALGGQEESGSPRWAPPTEQDAGLAGRAPGSASGPLSPSLSSGEGHFVCLDCGKRFSWWSSLKIHQRTHTGEKPYLCGKCGKSFSQKPNLARHQRHHTGERPFCCPECARRFSQKQHLLKHQKTHSRPATHSCPECERCFRHQVGLRIHQRAHARDRQGSRAGLHELIQDAAARRACRLQPGPPRGRPEWAWLGLCQGWWGQPGARAAVSGPEGPGEPRQFICNECGKSFTWWSSLNIHQRIHTGERPYACPECGRRFSQKPNLTRHLRNHTGERPHPCPHCGRGFRQKQHLLKHLRTHLPGAQAAPCPSCGKSCRSRAALRAHQRAHAVAEPAVPAGEPGDQPQAEAIPGLAARPRSSQRSPGARDTLWGRGQAGLAGPGEPRQFICNECGKSFSWWSALTIHQRIHTGERPYPCPECGRRFSQKPNLTRHRRNHTGERPYLCPACGRGFSQKQHLLKHQRVHRAAPACSPKEEAR

SEQ ID NO: 16412 - protein, 518 aa, Homo sapiens
MAAAALRPPAQGTVTFEDVAVNFSQEEWSLLSEAQRCLYHDVMLENLTLISSLGCWYGAKDETPSKQTLSIQQESPLRTHWTGVCTKKVHLWGMCGPLLGDILHQGTQHNQKLNGFGAYEKKLDDDANHHQDQKQHIGEKSYRSNAKGTSFVKNCKFHMSHEPFIFHEVGKDFLSSLRLLQQEDIHTSGKSNFETKHGIPLQGGKTHYICGESTIPFSNKHSLVLHQRLLPREGPYVCSDSGKFTSKSNSFNNHQGVRTGKRPYQCGQCDESFWYKAHLTEHQRVHTGERPYECGECDKSFSHKHSLVDHQRVHTGERPYECDECGKSFSHKRSLVHHQRVHTGERPYQCGECGKSFNHKCNLIQHQRVHTGERPFECTACGKLFRSNSHLKEHQRVHTGERPYECKECRKSFRYKSHLTEHQRVHTGERPYECRECGKCFHQKGSLIQHQQIHSGERPHECGECGKCFHQKGSLIRHQQIHSGERPHECGECGKCFRQKGNLIKHQRVHTGERHHEC

SEQ ID NO: 16413 - protein, 760 aa, Homo sapiens
MENQRSSPLSFPSVPQEETLRQAPAGLPRETLFQSRVLPPKEIPSLSPTIPRQGSLPQTSSAPKQETSGRMPHVLQKGPSLLCSAASEQETSLQGPLASQEGTQYPPPAAAEQEVSLLSHSPHHQEAPVHSPEAPEKDPLTLSPTVPETDMDPLLQSPVSQKDTPFQISSAVQKEQPLPTAEITRLAVWAAVQAVERKLEAQAMRLLTLEGRTGTNEKKIADCEKTAVEFANHLESKWVVLGTLLQEYGLLQRRLENMENLLKNRNFWILRLPPGSNGEVPKVPVTFDDVAVHFSEQEWGNLSEWQKELYKNVMRGNYESLVSMDYAISKPDLMSQMERGERPTMQEQEDSEEGETPTDPSAAHDGIVIKIEVQTNDEGSESLETPEPLMGQVEEHGFQDSELGDPCGEQPDLDMQEPENTLEESTEGSSEFSELKQMLVQQRNCTEGIVIKTEEQDEEEEEEEEDELPQHLQSLGQLSGRYEASMYQTPLPGEMSPEGEESPPPLQLGNPAVKRLAPSVHGERHLSENRGASSQQQRNRRGERPFTCMECGKSFRLKINLIIHQRNHIKEGPYECAECEISFRHKQQLTLHQRIHRVRGGCVSPERGPTFNPKHALKPRPKSPSSGSGGGGPKPYKCPECDSSFSHKSSLTKHQITHTGERPYTCPECKKSFRLHISLVIHQRVHAGKHEVSFICSLCGKSFSRPSHLLRHQRTHTGERPFKCPECEKSFSEKSKLTNHCRVHSRERPPPRWSSSFCSL

SEQ ID NO: 16414 - protein, 729 aa, Homo sapiens
MAAPDLAHGGHVSRDSVCLHEEQTQAAGMVAGWLINCYQDAVTFDDVAVDFTQEEWTLLDPSQRDLYRDVMLENYENLASVEWRLKTKGPALRQDRSWFRASNETQTARSHNGGQLCDRTQCGEAFSEHSGLSTHVRTQNTGDSCVSNHYERDFFIPCQKTLFKIGEQFSVLGQCGKAFSSTPNVVSQQACTRDRSLDYSSCGEVFLNQSYLQARAGSHNGEETWKWKPCGKALTHSMGCATPVEMHAVRNPHVCRECGKAFRYTAYLTGRVQVHPGEKPCELEECGKASPVSSSLTQHVRIHAAEKPCECKECGKAFTGLSGLSKHVQTDPGQKPYECKDCGKACGGFYLLNEHGKTHTREKPFACVVCGKYFRNSSCLNNHVRIHTGIKPYTCSYCGKAFTVRCGLTRHVRTHTGEKPYTCKDCGKAFCTSSGLTEHVRTHTGEKPYECKDCGKSFTVSSSLTEHARIHTGEKPYECKQCGKAFTGRSGLTKHMRTHTGEKPYECKDCGKAYNRVYLLNEHVKTHTEEKPFICTVCRKSFRNSSCLNKHIQIHTGIKPYECKDCGKTFTVSSSLTEHIRTHTGEKPYECKVCGKAFTTSSHLIVHIRTHTGEKPYICKECGKAFASSSHLIEHRRTHTGEKPYICNECGKAFRASSHLHKHGRIHTGQKPYKCKECGKAYNRFYLLKEHLKTYTEEQVFVCKDCGKSFKNSSCLNHHTQIHTDEKPF

SEQ ID NO: 16415 - protein, 641 aa, Homo sapiens
MVHGSVTFRDVAIDFSQEEWECLQPDQRTLYRDVMLENYSHLISLGSSISKPDVITLLEQEKEPWMVVRKETSRRYPDLELKYGPEKVSPENDTSEVNLPKQVIKQISTTLGIEAFYFRNDSEYRQFEGLQGYQEGNINQKMISYEKLPTHTPHASLICNTHKPYECKECGKYFSRSANLIQHQSIHTGEKPFECKECGKAFRLHIQFTRHQKFHTGEKPFECNECGKAFSLLTLLNRHKNIHTGEKLFECKECGKSFNRSSNLVQHQSIHSGVKPYECKECGKGFNRGAHLIQHQKIHSNEKPFVCKECGMAFRYHYQLIEHCQIHTGEKPFECKECGKAFTLLTKLVRHQKIHTGEKPFECRECGKAFSLLNQLNRHKNIHTGEKPFECKECGKSFNRSSNLVQHQSIHAGIKPYECKECGKGFNRGAHLIQHQKIHSNEKPFVCRECEMAFRYHCQLIEHSRIHTGDKPFECQDCGKAFNRGSSLVQHQSIHTGEKPYECKECGKAFRLYLQLSQHQKTHTGEKPFECKECGKFFRRGSNLNQHRSIHTGKKPFECKECGKAFRLHMHLIRHQKLHTGEKPFECKECGKAFRLHMQLIRHQKLHTGEKPFECKECGKVFSLPTQLNRHKNIHTGEKAS

SEQ ID NO: 16416 - protein, 833 aa, Homo sapiens
MVHGSVTFRDVAIDFSQEEWECLQPDQRTLYRDVMLENYSHLISLGSSISKPDVITLLEQEKEPWIVVSKETSRWYPDLESKYGPEKISPENDIFEINLPKHVIKQISKTLGLEAFYFRNDSEYRSRFEGRQGHQEGYINQKIISYEEMPAYTHASPIHNTHKPYECKECGKYFSCGSNLIQHQSIHTGEKPYKCKECGKAFQLHIQLTRHQKFHTGEKTFECKECGKAFNLPTQLNRHKNIHTVKKLFECKECGKSFNRSSNLTQHQSIHAGVKPYQCKECGKAFNRGSNLIQHQKIHSNEKPFVCRECEMAFRYHYQLIEHCRIHTGEKPFECKECRKAFTLLTKLVRHQKIHMGEKPFECRECGKAFSLLNQLNRHKNIHTGEKPFECKECGKSFNRSSNLIQHQSIHADVKPYECKECGKGFNRGANLIQHQKIHSNEKPFVCRECEMAFRYHYQLIQHCQIHTGGKPFECKECGKAFSLLTQLARHKNIHTGEKPFECKDCGKAFNRGSNLVQHQSIHTGEKPYECKECGKAFRLHLQLSQHEKTHTGEKPFECKECGKFFRRGSNLNQHRSIHTGKKPFECKECGKAFRLHMHLIRHQKFHTGEKPFECKECGKAFSLHTQLNHHKNIHTGEKPFKCKECGKSFNRVSNLVQHQSIHAGVKPYECKECGKGFSRVSNLIQHQKTHSSAKPFVCKECRKTFRYHYQLTEHYRIHTGEKPFECKECGKAFGLLTQLAQHQIIHTGEKPFKCKECGKAFNRGSNLVQPQSIHTGEKPYECKECGKAFRLHLQLSLHQKLVQVRNPLNVRNVGQPSDISSNLLNIRKFILG

SEQ ID NO: 16417 - protein, 355 aa, Homo sapiens
MQRNAMYLKNVAETACNFQLTQYQISHANQKPYECQICGKPFRKRAHLTQHNRIHTGGKPYECKECGKVFICCSTLIQHKRTHTSEKPYECLECRKTFRRSAHLIRHQRIHTGEKPYKCKQCWKAFASVSDLIDIGKFTLMRDFTNVQNVGRHLTIAQLLFSIREFTLVRSPLNVRNVAKHSIIAQHLLNTRELILMRNLMNVRNVKRLLGKVHILLNIKEFILVRNHMSVSNVGRLSLVFLILIDIREFTLVKNPMNVKNVVELLTIVQLLFNTREFTLVRRLMNISSVGRFLSPVQHLFNIREHILMKNLMNVSNARRPSSIMHILFDIKEFILVRNLINVSNVGRPLLLFLI

SEQ ID NO: 16418 - protein, 699 aa, Homo sapiens
MNTFQASVSFQDVTVEFSQEEWQHMGPVERTLYRDVMLENYSHLVSVGYCFTKPELIFTLEQGEDPWLLEKEKGFLSRNSPEDSQPDEISEKSPENQGKHLLQVLFTNKLLTTEQEISGKPHNRDINIFRARMMPCKCDIAGSACQGLSLMAPHCQYSKEKAHERNVCDKWLISIKDGRTNTQEKSFAYSKIVKTLHHKEEVIQHQTIQTLGQDFEYNESRKAFLEKAALVTSNSTHPKGKSYNFNKFGENKYDKSTFIIPQNMNPEKSHYEFNDTGNCFCRITHKTLTGGKSFSQKSHIREHHRVHIGVKPFEYGKSFNRNSTLPVHQRTHATDKYSDYHPCTETFSYQSTFSVHQKVHIRAKPYEYNECGKSCSMNSHLIWPQKSHTGEKPYECPECGKAFSEKSRLRKHQRTHTGEKPYKCDGCDKAFSAKSGLRIHQRTHTGEKPFECHECGKSFNYKSILIVHQRTHTGEKPFECNECGKSFSHMSGLRNHRRTHTGERPYKCDECGKAFKLKSGLRKHHRTHTGEKPYKCNQCGKAFGQKSQLRGHHRIHTGEKPYKCNHCGEAFSQKSNLRVHHRTHTGEKPYQCEECGKTFRQKSNLRGHQRTHTGEKPYECNECGKAFSEKSVLRKHQRTHTGEKPYNCNQCGEAFSQKSNLRVHQRTHTGEKPYKCDKCGRTFSQKSSLREHQKAHPGD

SEQ ID NO: 16419 - protein, 281 aa, Homo sapiens
MAEAAPARDPETDKHTEDQSPSTPLPQPAAEKNSYLYSTEITLWTVVAAIQALEKKVDSCLTRLLTLEGRTGTAEKKLADCEKTAVEFGNQLEGKWAVLGTLLQEYGLLQRRLENVENLLRNRNFWILRLPPGSKGEAPKVPVTFDDVAVYFSELEWGKLEDWQKELYKHVMRGNYETLVSLDYAISKPDILTRIERGEEPCLDRWGQEKGNEVEVGRPRMMGTGLPPYPEHLTSPLSPAQEELKEGQAPKQQQDSEARVAPAGPEAGLALRTDLQGEAQI

SEQ ID NO: 16420 - protein, 323 aa, Homo sapiens
MAAARPEAQSRSSPTPESRSQEPLDLVLVPDDCRPGTPPSDLIEIQVVKVTDTTLVPEPPEPGSFHCALCPAAFRLVSELLFHEHGHLAGAEGGGQGGDPSRCHVCGHSCPGPASLRAHYSLHTGERPYRCALCPRAFKALAPLLRHQHRHGVEPGTSRRPPDTAAVAEQRPGVAPERAEVVMAAAAAGAAVGKPFACRFCAKPFRRSSDMRDHERVHTGERPYHCGICGKGFTQSSVLSGHARIHTGERPFRCTLCDRTFNNSSNFRKHQRTHFHGPGPGLGDSGGQLGSSAAEGSGSGCGVGDPAEEGRGETAKVKVEADQ

SEQ ID NO: 16421 - protein, 405 aa, Homo sapiens
MGPPLAPRPAHVPGEAGPRRTRESRPGAVSFADVAVYFSPEEWECLRPAQRALYRDVMRETFGHLGALGFSVPKPAFISWVEGEVEAWSPEAQDPDGESSAAFSRGQGQEAGSRDGNEEKERLKKCPKQKEVAHEVAVKEWWPSVACPEFCNPRQSPMNPWLKDTLTRRLPHSCPDCGRNFSYPSLLASHQRVHSGERPFSCGQCQARFSQRRYLLQHQFIHTGEKPYPCPDCGRRFRQRGSLAIHRRAHTGEKPYACSDCKSRFTYPYLLAIHQRKHTGEKPYSCPDCSLRFAYTSLLAIHRRIHTGEKPYPCPDCGRRFTYSSLLLSHRRIHSDSRPFPCVECGKGFKRKTALEAHRWIHRSCSERRAWQQAVVGRSEPIPVLGGKDPPVHFRHFPDIFQECG

SEQ ID NO: 16422 - protein, 782 aa, Homo sapiens
MAEPPRLPLTFEDVAIYFSEQEWQDLEAWQKELYKHVMRSNYETLVSLDDGLPKPELISWIEHGGEPFRKWRESQKSGNIICSSVDMHFDPGFEEQLFWGSQQAMNSGKTKSHFQLDPESQCSFGSFVSFRPDQGITLGSPQRHDARAPPPLACGPSESTLKEGIPGPRNLDLPGLWDVPAWESTQHPWPVCGESCWENNHLVMHQRGHSKDRTRRAWEKFNKRAETQMPWSSPRVQRHFRCGVCGKSFRRKLCLLRHLAAHTGRGPFRNADGEMCFRHELTHPSHRLPQQGEKPAQCTPCGKRSLPVDSTQARRCQHSREGPASWREGRGASSSVHSGQKPGSRLPQEGNSHQEGDTEALQHGAEGPCSCSECGERSPMSARLASPCRAHTGEKPFQCAHCTKRFRLRRLLQVHQHAHGGERPFSCRKCGKGFAKQCKLTEHIRVHSGEKPFRCAKCGRNFRQRGQLLRHQRLHTDEKPFQCPECGLSFRLESMLRAHRLRHGGERPFSCSECGRGFTHQCKLREHLRVHSGERPFQCLKCDKRFRLKGILKAHQHTHSKERPFSCGECGKGFTRQSKLTEHLRVHSGERPFQCPECNRSFRLKGQLLSHQRLHTGERPFQCPECDKRYRVKADMKAHQLLHSGEMPFSCECGKGFVKHSKLIEHIRTHTGEKPFQCPKCDKSFRLKAQLLSHQGLHTGERPFHCPECDKNFRERGHMLRHQRIHRPERPFACGDCGKGFIYKSKLAEHIRVHTKSCPAPNELDIKKRLSQLFAMIEADWS

SEQ ID NO: 16423 - protein, 382 aa, Homo sapiens
MELREEAWSPGPLDSEDQQMASHENPVDILIMDDDDVPSWPPTKLSPPQSAPPAGPPPRPRPPAPYICNECGKSFSHWSKLTRHQRTHTGERPNACADCGKTFSQSSHLVQHRRIHTGEKPYACLECGKRFSWSSNLMQHQRIHTGEKPYTCPDCGRSFTQSKSLAKHRRSHSGLKPFVCPRCGRGFSQPKSLARHLRLHPELSGPGVAAKVLAASVRRAKGPEEAVAADGEIAIPVGDGEGIIVVGAPGEGAAAAAAMAGAGAKAAGPRSRRAPAPKPYVCLECGKGFGHGAGLLAHQRAQHGDGLGAAGGEEPAHICVECGEGFVQGAALRRHKKIHAVGAPSVCSSCGQSYYRAGGEEEDDDDEAAGGRCPECRGGEGR

SEQ ID NO: 16424 - protein, 82 aa, Homo sapiens
MRNMIPQDNENPPQQGEANQNDSVAFEDVAVNFTPDEWALLDPSQKNLYREVMQETLRNLASIEVLWKRDSLKVKVISMEKF

SEQ ID NO: 16425 - protein, 425 aa, Homo sapiens
MFPPARGKELLSFEDVAMYFTREEWGHLNWGQKDLYRDVMLENYRNMVLLGFQFPKPEMICQLENWDEQWILDLPRTGNRKASGSACPGSEARHKMKKLTPKQKFSEDLESYKISVVMQESAEKLSEKLHKCKEFVDSCRLTFPTSGDEYSRGFLQNLNLIQDQNAQTRWKQGRYDEDGKPFNQRSLLLGHERILTRAKSYECSECGKVIRRKAWFDQHQRIHFLENPFECKVCGQAFRQRSALTVHKQCHLQNKPYRCHDCGKCFRQLAYLVEHKRIHTKEKPYKCSKCEKTFSQNSTLIRHQVIHSGEKRHKCLECGKAFGRHSTLLCHQQIHSKPNTHKCSECGQSFGRNVDLIQHQRIHTKEEFFQCGECGKTFSFKRNLFRHQVIHTGSQPYQCVICGKSFKWHTSFIKHQGTHKGQIST

SEQ ID NO: 16426 - protein, 498 aa, Homo sapiens
MLEEGVLPSPGPALPQEENTGEEGMAAGLLTAGPRGSTFFSSVTVAFAQERWRCLVSTPRDRFKEGIPGKSRSLVLLGLPVSQPGMNSQLEQREGAWMLEGEDLRSPSPGWKIISGSPPEQALSEASFQDPCVEMPPGDSDHGTSDLEKSFNLRPVLSPQQRVPVEARPRKCETHTESFKNSEILKPHRAKPYACNECGKAFSYCSSLSQHQKSHTGEKPYECSECGKAFSQSSSLIQHQRIHTGEKPYKCSECGRAFSQNANLTKHQRTHTGEKPYRCSECEKAFSDCSALVQHQRIHTGEKPYECSDCGKAFRHSANLTNHQRTHTGEKPYKCSECGKAFSYCAAFIQHQRIHTGEKPYRCAACGKAFSQSANLTNHQRTHTGEKPYKCSECGKAFSQSTNLIIHQKTHTGEKPYKCNECGKFFSESSALIRHHIIHTGEKPYECNECGKAFNQSSSLSQHQRIHTGVKPYECSECGKAFRCSSAFVRHQRLHAGE

SEQ ID NO: 16427 - protein, 636 aa, Homo sapiens
MAHLMMFRDVAVDFSQEEWECLDLEQRDLYRDVMLENYSNMVSLGFCIYQPEAFSLLEKGKEPWKILRDETRGPCPDMQSRCQTKKLLPKNGIFEREIAQLEIMRICKNHSLDCLCFRGDWEGNTQFQTLQDNQEECFKQVIRTCEKRPTFNQHTVFNLHQRLNTGDKLNEFKELGKAFISGSDHTQHQLIHTSEKFCGDKECGNTFLPDSEVIQYQTVHTVKKTYECKECGKSFSLRSSLTGHKRIHTGEKPFKCKDCGKAFRFHSQLSVHKRIHTGEKSYECKECGKAFSCGSDLTRHQRIHTGEKPYECNECRKAFSQRSHLIKHQRIHTGEKPYECKECGKAFTRGSHLTQHQRIHTGEKSHECKECGKAFIRGSNLAQHQNVHVGRKPYKCEKCGKAYIWSSHLARHQRIHTGRKPYECKQCGKTFTWASYLAQHEKIHNERKSYECKECGKTFLHGSEFNRHQKIHTGERNYECKECGKTFFRGSELNRHQKIHTGKRPYECEECGKAFLWGSQLTRHQRMHTGEEPYVCKECGKSFIWGSQLTRHKKIHTDAEPYGCKKSSHIFSHHSYFTEQKIHNSANLCEWTDYGNTFSHESNFAQHQNIYTFEKSYEFKDFEKAFSSSSHFISLL

SEQ ID NO: 16428 - protein, 576 aa, Homo sapiens
MDSVAFEDVSVSFSQEEWALLAPSQKKLYRDVMQETFKNLASIGEKWEDPNVEDQHKNQGRNLRSHTGERLCEGKEGSQCAENFSPNLSVTKKTAGVKPYECTICGKAFMRLSSLTRHMRSHTGYELFEKPYKCKECEKAFSYLKSFQRHERSHTGEKPYKCKQCGKTFIYHQPFQRHERTHIGEKPYECKQCGKALSCSSSLRVHERIHTGEKPYECKQCGKAFSCSSSIRVHERTHTGEKPYACKECGKAFISHTSVLTHMITHNGDRPYKCKECGKAFIFPSFLRVHERIHTGEKPYKCKQCGKAFRCSTSIQIHERIHTGEKPYKCKECGKSFSARPAFRVHVRVHTGEKPYKCKECGKAFSRISYFRIHERTHTGEKPYECKKCGKTFNYPLDLKIHKRNHTGEKPYECKECAKTFISLENFRRHMITHTGDGPYKCRDCGKVFIFPSALRTHERTHTGEKPYECKQCGKAFSCSSYIRIHKRTHTGEKPYECKECGKAFIYPTSFQGHMRMHTGEKPYKCKECGKAFSLHSSFQRHTRIHNYEKPLECKQCGKAFSVSTSLKKHMRMHNR

SEQ ID NO: 16429 - protein, 632 aa, Homo sapiens
MAAAALRDPAQGCVTFEDVTIYFSQEEWVLLDEAQRLLYCDVMLENFALIASLGLISFRSHIVSQLEMGKEPWVPDSVDMTSAMARGAYGRPGSDFCHGTEGKDLPSEHNVSVEGVAQDRSPEATLCPQKTCPCDICGLRLKDILHLAEHQTTHPRQKPFVCEAYVKGSEFSANLPRKQVQQNVHNPIRTEEGQASPVKTCRDHTSDQLSTCREGGKDFVATAGFLQCEVTPSDGEPHEATEGVVDFHIALRHNKCCESGDAFNNKSTLVQHQRIHSRERPYECSKCGIFFTYAADLTQHQKVHNRGKPYECCECGKFFSQHSSLVKHRRVHTGESPHVCGDCGKFFSRSSNLIQHKRVHTGEKPYECSDCGKFFSQRSNLIHHKRVHTGRSAHECSECGKSFNCNSSLIKHWRVHTGERPYKCNECGKFFSHIASLIQHQIVHTGERPHGCGECGKAFSRSSDLMKHQRVHTGERPYECNECGKLFSQSSSLNSHRRLHTGERPYQCSECGKFFNQSSSLNNHRRLHTGERPYECSECGKTFRQRSNLRQHLKVHKPDRPYECSECGKAFNQRPTLIRHQKIHIRERSMENVLLPCSQHTPEISSENRPYQGAVNYKLKLVHPSTHPGEVP

SEQ ID NO: 16430 - protein, 406 aa, Homo sapiens
MIEYQIPVSFKDVVVGFTQEEWHRLSPAQRALYRDVMLETYSNLVSVGYEGTKPDVILRLEQEEAPWIGEAACPGCHCWEDIWRVNIQRKRRQDMLLRPGAAISKKTLPKEKSCEYNKFGKISLLSTDLFSSIQSPSNWNPCGKNLNHNLDLIGFKRNCAKKQDECYAYGKLLQRINHGRRPNGEKPRGCSHCEKAFTQNPALMYKPAVSDSLLYKRKRVPPTEKPHVCSECGKAFCYKSEFIRHQRSHTGEKPYGCTDCGKAFSHKSTLIKHQRIHTGVRPFECFFCGKAFTQKSHRTEHQRTHTGERPFVCSECGKSFGEKSYLNVHRKMHTGERPYRCRECGKSFSQKSCLNKHWRTHTGEKPYGCNECGKAFYQKPNLSRHQKIHARKNAYRNENLIIVGNT

SEQ ID NO: 16431 - protein, 643 aa, Homo sapiens
MASVALEDVAVNFTREEWALLGPCQKNLYKDVMQETIRNLDCVGMKWKDQNIEDQYRYPRKNLRCRMLERFVESKDGTQCGETSSQIQDSIVTKNTLPGVGPYESRMSGEVIMGHSSLNCYIRVGAGHKPYEYHECGEKPDTHKQRGKAFSYHNSLQTHERLHTGKKPYNCKECGKSFSSLGNLQRHMAVQRGDGPYKCKLCGKAFFWPSLLHMHERTHTGEKPYECKQCSKAFSFYSSYLRHERTHTGEKLYECKQCSKAFPDYSSCLRHERTHTGKKPYTCKQCGKAFSASTSLRRHETTHTDEKPYACQQCGKAFHHLGSFQRHMVMHTRDGPHKCKICGKGFDCPSSLKSHERTHTGEKLYECKQCGKALSHSSSFRRHMTMHTGDGPHKCKICGKAFVYPSVFQRHEKTHTAEKPYKCKQCGKAYRISSSLRRHETTHTGEKPYKCKCGKAFIDFYSFQNHKTTHAGEKPYECKECGKAFSCFQYLSQHRRTHTGEKPYECNTCKKAFSHFGNLKVHERIHSGEKPYECKECGKAFSWLTCFLRHERIHMREKPYECQQCGKAFTHSRFLQGHEKTHTGENPYECKECGKAFASLSSLHRHKKTHWKKTHTGENPYGCKECGKAFASLSSLHRHKKTH

SEQ ID NO: 16432 - protein, 575 aa, Homo sapiens
MDPEDEGVAGVMSVGPPAARLQEPVTFRDVAVDFTQEEWGQLDPTQRILYRDVMLETFGHLLSIGPELPKPEVISQLEQGTELWVAERGTTQGCHPAWEPRSESQASRKEEGLPEEEPSHVTGREGFPTDAPYPTTLGKDRECQSQSLALKEQNNLKQLEFGLKEAPVQDQGYKTLRLRENCVLSSSPNPFPEISRGEYLYTYDSQITDSEHNSSLVSQQTGSPGKQPGENSDCHRDSSQAIPITELTKSQVQDKPYKCTDCGKSFNHNAHLTVHKRIHTGERPYMCKECGKAFSQNSSLVQHERIHTGDKPYKCAECGKSFCHSTHLTVHRRIHTGEKPYECQDCGRAFNQNSSLGRHKRTHTGEKPYTCSVCGKSFSRTTCLFLHLRTHTEERPYECNHCGKGFRHSSSLAQHQRKHAGEKPFECRQRLIFEQTPALTKHEWTEALGCDPPLSQDERTHRSDRPFKCNQCGKCFIQSSHLIRHQITHTREEQPHGRSRRREQSSSRNSHLVQHQHPNSRKSSAGGAKAGQPESRALALFDIQKIMQEKNPVHVIGVEEPSVGASMLFDIREST

SEQ ID NO: 16433 - protein, 273 aa, Homo sapiens
MSPKRDGLGTGDGLHSQVLQEQVSTGDNLHECDSQGPSKDTLVREGKTYKCKECGSVFNKNSLLVRHQQIHTGVKPYECQECGKAFPEKVDFVRPMRIHTGEKPCKCVECGKVFNRRSHLLCYRQIHTGEKPYECSECGKTFSYHSVFIQHRVTHTGEKLFGCKECGKTFYYNSSLTRHMKIHTGEKPCKCSECGKTFTYRSVFFRHSMTHTAGKPYECKECGKGFYYSYSLTRHTRSHTGEKPYECLEHRKDFGYHSAFAQQSKIHSGGKNL

SEQ ID NO: 16434 - protein, 664 aa, Homo sapiens
MPLRDKYCQTDHHHHGCCEPVYILEPGDPPLLQQPLQTSKSGIQQIIECFRSGTKQLKHILLKDVDTIFECKLCRSLFRGLPNLITHKKFYCPPSLQMDDNLPDVNDKQSQAINDLLEAIYPSVDKREYIIKLEPIETNQNAVFQYISRTDNPIEVTESSSTPEQTEVQIQETSTEQSKTVPVTDTEVETVEPPPVEIVTDEVAPTSDEQPQESQADLETSDNSDFGHQLICCLCRKEFNSRRGVRRHIRKVHKKKMEELKKYIETRKNPNQSSKGRSKNVLVPLSRSCPVCCKSFATKANVRRHFDEVHRGLRRDSITPDIATKPGQPLFLDSISPKKSFKTRKQKSSSKAEYNLTACKCLLCKRKYSSQIMLKRHMQIVHKITLSGTNSKREKGPNNTANSSEIKVKVEPADSVESSPPSITHSPQNELKGTNHSNEKKNTPAAQKNKVKQDSESPKSTSPSAAGGQQKTRKPKLSAGFDFKQLYCKLCKRQFTSKQNLTKHIELHTDGNNIYVKFYKCPLCTYETRRKRDVIRHITVVHKKSSRYLGKITASLEIRAIKKPIDFVLNKVAKRGPSRDEAKHSDSKHDGTSNSPSKKYEVADVGIEVKVTKNFSLHRCNKCGKAFAKKTYLEHHKKTHKANASNSPEGNKTKGRSTRSKALV

SEQ ID NO: 16435 - protein, 1209 aa, Homo sapiens
MECYYIVISSTHLSNGHFRNIKGVFRGPLSKNGNKTLDYAEKENTIAKALEDLKANFYCELCDKQYYKHQEFDNHINSYDHAHKQRLKELKQREFARNVASKSRKDERKQEKALQRLHKLAELRKETVCAPGSGPMFKSTTVTVRENCNEISQRVVVDSVNNQQDFKYTLIHSEENTKDATTVAEDPESANNYTAKNNQVGDQAQGIHRHKIGFSFAFPKKASVKLESSAAAFSEYSDDASVGKGFSRKSRFVPSACHLQQSSPTDVLLSSEEKTNSFHPPEAMCRDKETVQTQEIKEVSSEKDALLLPSFCKFQLQLSSDADNCQNSVPLADQIPLESVVINEDIPVSGNSFELLGNKSTVLDMSNDCISVQATTEENVKHNEASTTEVENKNGPETLAPSNTEEVNITIHKKTNFCKRQCEPFVPVLNKHRSTVLQWPSEMLVYTTTKPSISYSCNPLCFDFKSTKVNNNLDKNKPDLKDLCSQQKQEDICMGPLSDYKDVSTEGLTDYEIGSSKNKCSQVTPLLADDILSSSCDSGKNENTGQRYKNISCKIRETEKYNFTKSQIKQDTLDEKYNKIRLKETHEYWFHKSRRKKKRKKLCQHHHMEKTKESETRCKMEAENSYTENAGKYLLEPISEKQYLAAEQLLDSHQLLDKRPKSESISLSDNEEMCKTWNTEYNTYDTISSKNHCKKNTILLNGQSNATMIHSGKHNLTYSRTYCCWKTKMSSCSQDHRSLVLQNDMKHMSQNQAVKRGYNSVMNESERFYRKRRQHSHSYSSDESLNRQNHLPEEFLRPPSTSVAPCKPKKKRRRKRGRFHPGFETLELKENTDYPVKDNSSLNPLDRLISEDKKEKMKPQEVAKIERNSEQTNQLRNKLSFHPNNLLPSETNGETEHLEMETTSGELSDVSNDPTTSVCVASAPTKEAIDNTLLEHKERSENINLNEKQIPFQVPNIERNFRQSQPKSYLCHYELAEALPQGKMNETPTEWLRYNSGILNTQPPLPFKEAHVSGHTFVTAEQILAPLALPEQALLIPLENHDKFKNVPCEVYQHILQPNMLANKVKFTFPPAALPPPSTPLQPLPLQQSLCSTSVTTIHHTVLQQHAAAAAAAAAAAAAGTFKVLQPHQQFLSQIPALTRTSLPQLSVGPVGPRLCPGNQPTFVAPPQMPIIPASVLHPSHLAFPSLPHALFPSLLSPHPTVIPLQPLF

SEQ ID NO: 16436 - protein, 1349 aa, Homo sapiens
MACYLVISSRHLSNGHYRGIKGVFRGPLCKNGSPSPDFAEKKSTAKALEDVKANFYCELCDKQYHKHQEFDNHINSYDHAHKQRLKELKQREFARNVASKSWKDEKKQEKALKRLHQLAELRQQSECVSGNGPAYKAPRVAIEKQLQQGIFPIKNGRKVSCMKSALLLKGKNLPRIISDKQRSTMPNRHQLQSDRRCLFGNQVLQTSSDLSNANHRTGVSFTFSKKVHLKLESSASVFSENTEETHDCNKSPIYKTKQTADKCKCCRFANKDTHLTKEKEVNISPSHLESVLHNTISINSKILQDKHDSIDETLEDSIGIHASFSKSNIHLSDVDFTPTSREKETRNTLKNTLENCVNHPCQANASFSPPNIYNHSDARISECLDEFSSLEPSEQKSTVHLNPNSRIENREKSLDKTERVSKNVQRLVKEACTHNVASKPLPFLHVQSKDGHTTLQWPTELLLFTKTEPCISYGCNPLYFDFKLSRNTKEDHNLEDLKTELGKKPLELKTKRESQVSGLTEDQQKLIQEDYQYPKPKTMIANPDWEKFQRKYNLDYSDSEPNKSEYTFSANDLEMKNPKVPLYLNTSLKDCAGKNNSSENKLKEASRAHWQGCRKAVLNDIDEDLSFPSYISRFKKHKLIPCSPHLEFEDERQFNCKSSPCTVGGHSDHGKDFSVILKSNHISMTSKVSGCGNQRYKRYSPQSCLSRYSSSLDTSPSSMSSLRSTCSSHRFNGNSRGNLLCFHKREHHSVERHKRKCLKHNCFYLSDDITKSSQMQSEPQKERNCKLWESFKNEKYSKRRYCHCRERQKLGKNQQQFSGLKSTRIIYCDSNSQISCTGSSKKPPNCQGTQHDRLDSYSIEKMYYLNKSKRNQESLGSPHICDLGKVRPMKCNSGNISCLLKNCSSGPSETTESNTAEGERTPLTAKILLERVQAKKCQEQSSNVEISSNSCKSELEAPSQVPCTIQLAPSGCNRQALPLSEKIQYASESRNDQDSAIPRTTEKDKSKSSHTNNFTILADTDCDNHLSKGIIHLVTESQSLNIKRDATTKEQSKPLISEIQPFIQSCDPVPNEFPGAFPSNKYTGVTDSTETQEDQINLDLQDVSMHINHVEGNINSYYDRTMQKPDKVEDGLEMCHKSISPPLIQQPITFSPDEIDKYKILQLQAQQHMQKQLLSKHLRVLPAAGPTAFSPASTVQTVPVHQHTSITTIHHTFLQHFAVSASLSSHSSHLPIAHLHPLSQAHFSPISFSTLTPTIIPAHPTFLAGHPLHLVAATPFHPSHITLQPLPPTAFIPTLFGPHLNPATTSIIHLNPLIQPVFQGQDFCHHSCSSQMQQLNEVKEALNVSTHLN

SEQ ID NO: 16437 - protein, 627 aa, Homo sapiens
MAMALTDPAQVSVTFDDVAVTFTQEEWGQLDLAQRTLYQEVMLENCGLLVSLGCPVPRPELIYHLEHGQEPWTRKEDLSQGTCPGDKGKPKSTEPTTCELALSEGISFWGQLTQGASGDSQLGQPKDQDGFSEMQGERLRPGLDSQKEKLPGKMSPKHDGLGTADSVCSRIIQDRVSLGDDVHDCDSHGSGKNPVIQEEENIFKCNECEKVFNKKRLLARHERIHSGVKPYECTECGKTFSKSTYLLQHHMVHTGEKPYKCMECGKAFNRKSHLTQHQRIHSGEKPYKCSECGKAFTHRSTFVLHNRSHTGEKPFVCKECGKAFRDRPGFIRHYIIHSGENPYECFECGKVFKHRSYLMWHQQTHTGEKPYECSECGKAFCESAALIHHYVIHTGEKPFECLECGKAFNHRSYLKRHQRIHTGEKPYVCSECGKAFTHCSTFILHKRAHTGEKPFECKECGKAFSNRADLIRHFSIHTGEKPYECMECGKAFNRRSGLTRHQRIHSGEKPYECIECGKTFCWSTNLIRHSIIHTGEKPYECSECGKAFSRSSSLTQHQRMHTGRNPISVTDVGRPFTSGQTSVNIQELLLGKNFLNVTTEENLLQEEASYMASDRTYQRETPQVSSL

SEQ ID NO: 16438 - protein, 589 aa, Homo sapiens
MIKFQERVTFKDIAVIFTKEELAVLDKAQINLYQDVMLENFRNFISVDGIKNNILNLQGKGLIYLSQEELHCWKIWKQRIRDLSVSQDYIMNLQEQCSPHLEDVSLCEEWAGMSLQISENENYVVNAIIKNQDITAWQSLTQVLTPESWRKANIMTEPQKSQGRYKGIYVEEKLYRHARHDESLNWTSRDHHESQECKGEDPGRHPNCGKNLGMKSTVEQHHAVHVLPQPFTCNNCGVAFADDTDPRVHHSTHLGEKSYKCDQYGKNLSQSQYLIVHCKTHSGETPYEFHEWPTGCKQSSDLPRCQKVPSGDNPYKCKECGKGFRCNSSLHNHHRVHTGEMPYKCHVCGKAFGFRSLPCIHQGVHTGKKPYKCEDCGKGFEQSSNLLIHQRVHTGEKPYKSSECGKCFSSSSVLQVHWRFHTGEKPYRCGECGKGFSQSTHLHIHQRVHTGEKQYNAMCVERILGIVLFFTLIREFTLQKNHINAKCVESALVTVHIFTSIKAITQERNHINVMSVVKASVGIQIFNVHLRVHRGQRPCKCKACGKGFSRNSHLLAQQRVRIDKTQYTHCEHGKDLLTHQRLHEQRETL

SEQ ID NO: 16439 - protein, 903 aa, Homo sapiens
MLREEAAQKRKGKESGMALPQGRLTFRDVAIEFSLAEWKFLNPAQRALYREVMLENYRNLEAVDISSKHMMKEVLSTGQGNREVIHTGTLQRHQSYHIGDFCFQEIEKEIHNIEFQCQEDERNGHEAPTTKIKKLTGSTDQHDHRHAGNKPIKDQLGSSFYSHLPELHIFQIKGEIANQLEKSTSDASSVSTSQRISCRPQIHISNNYGNNPLNSSLLPQKQEVHMREKSFPCNESGKAFNCSSLLRKHQIPHLGDKQYKCDVCGKLFNHKQYLACHRRCHTGEKPYKCKECGKSFSYKSSLTCHHRLHTGVKPYKCNECGKVFRQNSALVIHKAIHTGEKPYKCNECGKAFNQQSHLSRHQRLHTGVKPYKCKICEKAFACHSYLANHTRIHSGEKTYKCNECGKAFNHQSSLARHHILHTGEKPYKCEECDKVFSQKSTLERHKRIHTGEKPYKCKVCDTAFTCNSQLARHRRIHTGEKTYKCNECRKTFSRRSSLLCHRRLHSGEKPYKCNQCGNTFRHRASLVYHRRLHTLEKSYKCTVCNKVFMRNSVLAVHTRIHTAKKPYKCNECGKAFNQQSHLSRHRRLHTGEKPYKCEACDKVFGQKSALESHKRIHTGEKPYRCQVCDTAFTWNSQLARHTRIHTGEKTYKCNECGKTFSYKSSLVWHRRLHGGEKSYKCKVCDKAFVCRSYVAKHTRIHSGMKPYKCNECSKTFSNRSSLVCHRRIHSGEKPYKCSECSKTFSQKATLLCHRRLHSGEKPYKCNDCGNTFRHWSSLVYHRRLHTGEKSYKCTVCDKAFVRNSYLARHIRIHTAEKPYKCNECGKAFNEQSHLSRHHRIHTGEKPYKCEACDKVFSRKSHLKRHRIIHTGEKPYKCNECGKAFSDRSTLIHHQAIHGIGKFD

SEQ ID NO: 16440 - protein, 661 aa, Homo sapiens
MPANEDAPQPGEHGSACEVSVSFEDVTVDFSREEWQQLDSTQRRLYQDVMLENYSHLLSVGFEVPKPEVIFKLEQGEGPWTLEGEAPHQSCSDGKFGIKPSQRRISGKSTFHSEMEGEDTRDDSLYSILEELWQDAEQIKRCQEKHNKLLSRTTFLNKKILNTEWDYEYKDFGKFVHPSPNLILSQKRPHKRDSFGKSFKHNLDLHIHNKSNAAKNLDKTIGHGQVFTQNSSYSHHENTHTGVKFCERNQCGKVLSLKHSLSQNVKFPIGEKANTCTEFGKIFTQRSHFFAPQKIHTVEKPHELSKCVNVFTQKPLLSIYLRVHRDEKLYICTKCGKAFIQNSELIMHEKTHTREKPYKCNECGKSFFQVSSLLRHQTTHTGEKLFECSECGKGFSLNSALNIHQKIHTGERHHKCSECGKAFTQKSTLRMHQRIHTGERSYICTQCGQAFIQKAHLIAHQRIHTGEKPYECSDCGKSFPSKSQLQMHKRIHTGEKPYICTECGKAFTNRSNLNTHQKSHTGEKSYICAECGKAFTDRSNFNKHQTIHTGEKPYVCADCGRAFIQKSELITHQRIHTTEKPYKCPDCEKSFSKKPHLKVHQRIHTGEKPYICAECGKAFTDRSNFNKHQTIHTGDKPYKCSDCGKGFTQKSVLSMHRNIHT

SEQ ID NO: 16441 - protein, 617 aa, Homo sapiens
MALPQGLLTFRDVAIEFSQEEWKCLDPAQRTLYRDVMLENYRNLVSLDISSKCMMKEFSSTAQGNREVIHTGTLQRHESHHTGDFRFQEIDKDIHNLEFQWQEDERNSHEAPMTEIKKLTGSADRYDQRHAGNKPIKDQLGSSFHSHLPELHMFQTQGKIGNQVEKSINDASSISTSQRISCRPKTHISNNYGNNFRNSSLLTQKQEVHMREKSFQCNESGKAFNYSSLLRKHQIIHLGEKQYKCDVCGKVFNRKRNLVCHRRCHTGEKPYRCNECGKTFSQTYSLTCHRRLHTGEKPYKCEECDKAFSFKSNLKRHRRIHAGEKPYKCNECGKTFSQTSSLTCHRRLHTGEKPFKCNECGKTFSRKSSLTCHHRLHTGEKPYKCNECGKTFSQELTLKCHRRLHTGEKPYKCNECGKVFNKKANLARHHRLHSGEKPYKCTECVKTFSRNSALVIHKAIHIGEKRYKCNECGKTFSRISALVIHTAIHTGEKPYKCNECGKGFNRKTHLACHHRLHTGEKPYKCNECGKVFNRKTHLAHHHRLHTGDKPYKCNECGKVFNQKAHLARHHRLHTGEKPYKCNECGKVFNQKANLARHHRLHTGEKPYKFNECGKAFN

SEQ ID NO: 16442 - protein, 855 aa, Homo sapiens
MAAAATLRLSAQGTVTFEDVAVNFTWEEWNLLSEAQRCLYRDVTLENLALISSLGCWCGVEDEAAPSKQSIYIQRETQVRTPMAGVSPKKAHPCEMCGPILGDILHVADHQGTHHKQKLHRCEAWGNKLYDSGNFHQHQNEHIGEKPYRGSVEEALFAKRCKLHVSGESSVFSESGKDFLPRSGLLQQEASHTGEKSNSKTECVSPIQCGGAHYSCGESMKHFSTKHILSQHQRLLTREECYVCCECGKSFSKYASLSNHQRVHTEKKHECGECGKSFSKYVSFSNHQRVHTEKKHECGECGKSFSKYVSFSNHQRVHTGKRPYECGECGKSFSKYASFSNHQRVHTEKKHYECGECGKSFSKYVSFSNHQRVHTGKRPYECGECGKSFSKYASFSNHQRVHTDKKHYECGECGKSFSQKSSLIQHQRFHTGEKPYGCEECGKSFSSEGHLRSHQRVHAGERPFKCGECVKSFSHKRSLVHHQRVHSGERPYQCGECGKSFSQKGNLVLHQRVHTGARPYECGECGKSFSSKGHLRNHQQIHTGDRLYECGECGKSFSHKGTLILHQRVHPRERSYGCGECGKSFSSIGHLRSHQRVHTGERPYECGECGKSFSHKRSLVHHQRMHTGERPYKCGDCGKSFNEKGHLRNHQRVHTTERPFKCGECGKCFSHKGNLILHQHGHTGERPYVCRECGKLFKKKSHLLVHQRIHNGEKPYACEACQKFFRNKYQLIAHQRVHTGERPYECNDCGKSFTHSSTFCVHKRIHTGEKPYECSECGKSFAESSSFTKHKRVHTGEKPYECSECGKSFAESSSLTKHKRVHTGEKPYKCEKCGKLFNKKSHLLVHQSSHWRKAI

SEQ ID NO: 16443 - protein, 651 aa, Homo sapiens
MLREEATKKSKEKEPGMALPQGRLTFRDVAIEFSLEEWKCLNPAQRALYRAVMLENYRNLEFVDSSLKSMMEFSSTRHSITGEVIHTGTLQRHKSHHIGDFCFPEMKKDIHHFEFQWQEVERNGHEAPMTKIKKLTGSTDRSDHRHAGNKPIKDQLGLSFHSHLPELHMFQTKGKISNQLDKSIGASSASESQRISCRLKTHISNKYGKNFLHSSFTQIQEICMREKPCQSNECGKAFNYSSLLRRHHITHSREREYKCDVCGKIFNQKQYIVYHHRCHTGEKTYKCNECGKTFTQMSSLVCHRRLHTGEKPYKCNECGKTFSEKSSLRCHRRLHTGEKPYKCNECGKTFGRNSALVIHKAIHTGEKPYKCNECGKTFSQKSSLQCHHILHTGEKPYKCEECDNVYIRRSHLERHRKIHTGEGSYKCKVCDKVFRSDSYLAEHQRVHTGEKPYKCNKCGRSFSRKSSLQYHHTLHTGEKPYTCNECGKVFSRRENLARHHRLHAGEKPYKCEECDKVFSRRSHLERHRRIHTGEKPYKCKVCDKAFRSDSCLANHTRVHTGEKPYKCNKCAKVFNQKGILAQHQRVHTGEKPYKCNECGKVFNQKASLAKHQRVHTAEKPYKCNECGKAFTGQSTLIHHQAIHGCRETLQM

SEQ ID NO: 16444 - protein, 412 aa, Homo sapiens
MSRRKQTNPNKVHWDQVFAGLEEQARQAMMKTDFPGDLGSQRQAIQQLRDQDSSSSDSEGDEEETTQDEVSSHTSEEDGGVVKVEKELENTEQPVGGNEVVEHEVTGNLNSDPLLELCQCPLCQLDCGSREQLIAHVYQHTAAVVSAKSYMCPVCGRALSSPGSLGRHLLIHSEDQRSNCAVCGARFTSHATFNSEKLPEVLNMESLPTVHNEGPSSAEGKDIAFSPPVYPAGILLVCNNCAAYRKLLEAQTPSVRKWALRRQNEPLEVRLQRLERERTAKKSRRDNETPEEREVRRMRDREAKRLQRMQETDEQRARRLQRDREAMRLKRANETPEKRQARLIREREAKRLKRRLEKMDMMLRAQFGQDPSAMAALAAEMNFFQLPVSGVELDSQLLGKMAFEEQNSSSLH

SEQ ID NO: 16445 - protein, 610 aa, Homo sapiens
MDSVAFEDVAVNFTQEEWALLGPSQKSLYRNVMQETIRNLDCIEMKWEDQNIGDQCQNAKRNLRSHTCEIKDDSQCGETFGQIPDSIVNKNTPRVNPCDSGECGEVVLGHSSLNCNIRVDTGHKSCEHQEYGEKPYTHKQRGKAISHQHSFQTHERPPTGKKPFDCKECAKTFSSLGNLRRHMAAHHGDGPYKCKLCGKAFVWPSLFHLHERTHTGEKPYECKQCSKAFPFYSSYLRHERIHTGEKAYECKQCSKAFPDYSTYLRHERTHTGEKPYKCTQCGKAFSCYYYTRLHERTHTGEQPYACKQCGKTFYHHTSFRRHMIRHTGDGPHKCKICGKGFDCPSSVRNHETTHTGEKPYECKQCGKVLSHSSSFRSHMITHTGDGPQKCKICGKAFGCPSLFQRHERTHTGEKPYQCKQCGKAFSLAGSLRRHEATHTGVKPYKCQCGKAFSDLSSFQNHETTHTGEKPYECKECGKAFSCFKYLSQHKRTHTVEKPYECKTCRKAFSHFSNLKVHERIHSGEKPYECKECGKAFSWLTCLLRHERIHTGEKPYECLQCGKAFTRSRFLRGHEKTHTGEKLYECKECGKALSSLRSLHRHKRTHWKDTL

SEQ ID NO: 16446 - protein, 1081 aa, Homo sapiens
MPRRKQEQPKRLPSHVSRQEEAEGELSEGEHWYGNSSETPSEASYGEVQENYKLSLEDRIQEQSTSPDTSLGSTTPSSHTLELVALDSEVLRDSLQCQDHLSPGVSSLCDDDPGSNKPLSSNLRRLLEAGSLKLDAAATANGRVESPVNVGSNLSFSPPSHHAQQLSVLARKLAEKQEQNDQYTPSNRFIWNQGKWLPNSTTTCSLSPDSAILKLKAAANAVLQDKSLTRTEETMRFESFSSPFSSQSASSTLAALSKKVSERSLTPGQEHPPPASSFLSLASMTSSAALLKEVAARAAGSLLAEKSSLLPEDPLPPPPSEKKPEKVTPPPPPPPPPPPPPPPQSLELLLLPVPKGRVSKPSNSASEEESGKPFQCPICGLVIKRKSYWKRHMVIHTGLKSHQCPLCPFRCARKDNLKSHMKVHQHQDRGETFQCQLCPFTSSRHFSLKLHMRCHQHFLRTEAKVKEEIPDPDVKGSPHLSDSACLGQQREGGGTELVGTMMTSNTPERTSQGGAGVSPLLVKEEPKEDNGLPTSFTLNAADRPANHTKLKDPSEYVANSASALFSQDISVKMASDFLMKLSAANQKEPMNLNFKVKEEPKEGESLSTTLPRSSYVFSPESEVSAPGVSEDALKPQEGKGSVLRRDVSVKAASELLMKLSAESYKETQMVKIKEEPMEVDIQDSHVSISPSRNVGYSTLIGREKTEPLQKMPEGRVPPERNLFSQDISVKMASELLFQLSEKVSKEHNHTKENTIRTTTSPFFSEDTFRQSPFTSNSKELLPSDSVLHGRISAPETEKIVLEAGNGLPSWKFNDQLFPCDVCGKVFGRQQTLSRHLSLHTEERKYKCHLCPYAAKCRANLNQHLTVHSVKLVSTDTEDIVSAVTSEGSDGKKHPYYYSCHVCGFETELNVQFVSHMSLHVDKEQWMFSICCTACDFVTMEEAEIKTHIGTKHTGEDRKTPSESNSPSSSSLSALSDSANSKDDSDGSQKNKGGNNLLVISVMPGSQPSLNSEEKPEKGFECVFCNFVCKTKNMFERHLQIHLITRMFECDVCHKFMKTPEQLLEHKKCHTVPTGGLNSGQW

SEQ ID NO: 16447 - protein, 432 aa, Homo sapiens
MPHSPLISIPHVWCHPEEEERMHDELLQAVSKGPVMFRDVSIDFSQEEWECLDADQMNLYKEVMLENFSNLVSVGLSNSKPAVISLLEQGKEPWMVDRELTRGLCSDLESMCETKILSLKKRHFSQVIITREDMSTFIQPTFLIPPQKTMSEEKPWECKICGKTFNQNSQFIQHQRIHFGEKHYESKEYGKSFSRGSLVTRHQRIHTGKKPYECKECGKAFSCSSYFSQHQRIHTGEKPYECKECGKAFKYCSNLNDHQRIHTGEKPYECKVCGKAFTKSSQLFLHLRIHTGEKPYECKECGKAFTQHSRLIQHQRMHTGEKPYECKQCGKAFNSASTLTNHHRIHAGEKLYECEECRKAFIQSSELIQHQRIHTDEKPYECNECGKAFNKGSNLTRHQRIHTGEKPYDCKECGKAFGSRSDLIRHEGIHTG

SEQ ID NO: 16448 - protein, 516 aa, Homo sapiens
MHGRKDDAQKQPVKNQLGLNPQSHLPELQLFQAEGKIYKYDHMEKSVNSSSLVSPPQRISSTVKTHISHTYECNFVDSLFTQKEKANIGTEHYKCSERGKAFHQGLHFTIHQIIHTKETQFKCDICGKIFNKKSNLASHQRIHTGEKPYKCNECGKVFHNMSHLAQHRRIHTGEKPYKCNECGKVFNQISHLAQHQRIHTGEKPYKCNECGKVFHQISHLAQHRTIHTGEKPYECNKCGKVFSRNSYLVQHLIIHTGEKPYRCNVCGKVFHHISHLAQHQRIHTGEKPYKCNECGKVFSHKSSLVNHWRIHTGEKPYKCNECGKVFSHKSSLVNHWRIHTGEKPYKCNECGKVFSRNSYLAQHLIIHAGEKPYKCDECDKAFSQNSHLVQHHRIHTGEKPYKCDECGKVFSQNSYLAYHWRIHTGEKAYKCNECGKVFGLNSSLAHHRKIHTGEKPFKCNECGKAFSMRSSLTNHHAIHTGEKHFKCNECGKLFRDNSYLVRHQRFHAGKKSNTCN

SEQ ID NO: 16449 - protein, 372 aa, Homo sapiens
MASSASARTPAGKRVINQEELRRLMKEKQRLSTSRKRIESPFAKYNRLGQLSCALCNTPVKSELLWQTHVLGKQHREKVAELKGAKEASQGSSASSAPHSVKRKAPDADDQDVKRAKATLVPQVQPSTSAWTTNFDKIGKEFIRATPSKPSGLSLLPDYEDEEEEEEEEEGDGERKRGDASKPLSDAQGKEHSVSSSREVTSSVLPNDFFSTNPPKAPIIPHSGSIEKAEIHEKVVERRENTAEALPEGFFDDPEVDARVRKVDAPKDQMDKEWDEFQKAMRQVNTISEAIVAEEDEEGRLDRQIGEIDEQIECYRRVEKLRNRQDEIKNKLKEILTIKELQKKEEENADSDDEGELQDLLSQDWRVKGALL

SEQ ID NO: 16450 - protein, 1677 aa, Homo sapiens
MEVPEPTCPAPPARDQPAPTPGPPGAPGGQASPHLTLGPVLLPPEQGLAPPTVFLKALPIPLYHTVPPGGLQPRAPLVTGSLDGGNVPFILSPVLQPEGPGPTQVGKPAAPTLTVNIVGTLPVLSPGLGPTLGSPGKVRNAGKYLCPHCGRDCLKPSVLEKHIRSHTGERPFPCATCGIAFKTQSNLYKHRRTQTHLNNSRLSSESEGAGGGLLEEGDKAGEPPRPEGRGESRCQGMHEGASERPLSPGAHVPLLAKNLDVRTEAAPCPGSAFADREAPWDSAPMASPGLPAASTQPWRKLPEQKSPTAGKPCALQRQQATAAEKPWDAKAPEGRLRKCESTDSGYLSRSDSAEQPHAPCSPLHSLSEHSAESEGEGGPGPGPGVAGAEPGAREAGLELEKKRLEERIAQLISHNQAVVDDAQLDNVRPRKTGLSKQGSIDLPTPYTYKDSFHFDIRALEPGRRRAPGPVRSTWTPPDKSRPLFFHSVPTQLSTTVECVPVTRSNSLPFVEGSRTWLEPREPRDPWSRTQKPLSPRPGPARLGCRSGLSSTDVPSGHPRALVRQAAVEDLPGTPIGDALVPAEDTDAKRTAAREAMAGKGRAGGRKCGQRRLKMFSQEKWQVYGDETFKRIYQKMKASPHGGKKAREVGMGSGAELGFPLQKEAAGSSGTVPTQDRRTPVHEDISAGATPEPWGNPPALEASLVTEPTKHGETVARRGDSDRPRVEEAVSSPALGGRDSPCSGSRSPLVSPNGRLELGWQMPPAPGPLKGGDVEAPRPVWPDPKLEGGARGVGDVQETCLWAQTVLRWPSRGSGEDKLPSERKKLKVEDLHSWKQPEPVSAETPGGPTQPASLSSQKQDADPGEVPGGSKESARQVGEPLESSGASLAAASVALKRVGPRDKATPLHPAAPAPAEHPSLATPPQAPRVLSALADNAFSPKYLLRLPQAETPLPLPIPWGPRHSQDSLCSSGWPEERASFVGSGLGTPLSPSPASGPSPGEADSILEDPSCSRPQDGRKGAQLGGDKGDRMATSRPAARELPISAPGAPREATSSPPTPTCEAHLVQDMEGDSHRIHRLCMGSTLARARLSGDVLNPWVPNWELGEPPGNAPEDPSSGPLVGPDPCSPLQPGSFLTALTRPQGVPPGWPELALSSHSGTSRSHSTRSPHSTQNPFPSLKAEPRLTWCCLSRSVPLPAEQKAKAASVYLAVHFPGSSLRDEGPNGPPGSNGGWTWTSPGEGGPAQMSKFSYPTVPGVMPQHQVSEPEWKKGLPWRAKMSRGNSKQRKLKINPKRYKGNFLQSCVQLRASRLRTPTWVRRRSRHPPALEGLKPCRTPGQTSSEIAGLNLQEEPSCATSESPPCCGKEEKKEGDCRQTLGTLSLGTSSRIVREMDKRTVKDISPSAGEHGDCTTHSTAATSGLSLQSDTCLAVVNDVPLPPGKGLDLGLLETQLLASQDSVSTDPKPYIFSDAQRPSSFGSKGTFPHHDIATSVAAVCISLPVRTDHIAQEIHSAESRDHSQTAGRTLTSSSPDSKVTEEGRAQTLLPGRPSSGQRISDSVPLESTEKTHLEIPASGPSSASSHHKEGRHKTFFPSRGQYGCGEMTVPCPSLGSDGRKRQVSGLITRKDSVVPSKPEQPIEIPEAPSKSLKKRSLEGMRKQTRVEFSDTSSDDEDRLVIEI

SEQ ID NO: 16451 - protein, 187 aa, Homo sapiens
MVMHSEDEPYKCKFCGKAFDNLHLYLTHERTHTGEKPYECNKCGKAFSCSSSIRKHARIHTGEKPYICKQCGKAFRYSSSIRNHENTHTGEKPCECKQCGKAFSYSSYFRIHERIHTGEQVYKCKECGKTFTYPSAFHKHKSTHTSQKLYECKECGKAFDCFSSFHSHEGVHTGEKPYECRTWKSLQ

SEQ ID NO: 16452 - protein, 537 aa, Homo sapiens
MEGLLSVALQGAELEGNWKHEGQVEDLQENQESCPEPEAVACKGDPAGDSMQERDEFSRIPRTISSPAATQASVPDDSSSRRCSAPGESPKERHPDSRQRERGGGPKKPWKCGDCGKAFSYCSAFILHQRIHTGEKPFACPECGKAFSQSVHLTLHQRTHTGEKPYACHECGKAFSQGSYLASHWRTHTGEKPHRCADCGKAFTRVTHLTQHRRVHTGERPYACAQCAKAFRNRSSLIEHQRIHTGEKPYECSACAKAFRFSSALIRHQRIHTEEKPYRCGQCAKAFAQIAHLTQHRRVHTGEKPYTCQDCGALFSQSASLAEHRRIHTGEKPYACGQCAKAFTQVSHLTQHQRTHTGERPYPCHDCGKRFSNRSHLLQHRLVHTGERPYRCLQCGAAFSHVSSLIEHQKIHTGERPYKCGECGKAFSQGSSLALHQRTHTGERPYTCPECGKAFSNRSYLIQHHIVHTGEKPYECSGCGKAFSFSSALIRHQRTHADSSGRLCPAPTPDSTPGLSQGGETCQQGCPGRNPRGPAED

SEQ ID NO: 16453 - protein, 936 aa, Homo sapiens
MALTQGPLTFRDVAIEFSQEEWKSLDPVQKALYWDVMLENYRNLVFLGILPKCMTKELPPIGNSNTGEKCQTVTLERHECYDVENFYLREIQKNLQDLEFQWKDGEINYKEVPMTYKNNLNGKRGQHSQEDVENKCIENQLTLSFQSRLTELQKFQTEGKIYECNQSEKTVNNSSLVSPLQRILPSVQTNISKKYENEFLQLSLPTQLEKTHIREKPYMCKGCGKAFRVSSSLINHQMVHTTEKPYKCNECGKAFHRGSLLTIHQIVHTRGKPYQCGVCGKIFRQNSDLVNHRRSHTGEKPYKCNECGKSFSQSYNLAIHQRIHTGEKPYKCNECGKTFKQGSCLTTHQIIHTGEKPYQCDICGKVFRQNSNLVNHQRIHTGEKPYKCNICGKSFSQSSNLATHQTVHSGNKPYKCDECGKTFKRSSSLTTHQIIHTGEKPYTCDVCDKVFSQRSQLARHQRSHTGEKPYKCNECGKVFSQTSHLVGHRRIHTGEKPYKCDKCGKAFKQGSLLTRHKIIHTREKRYQCGECGKVFSENSCLVRHLRIHTGEQPYKCNVCGKVFNYSGNLSIHKRIHTGEKPFQCNECGTVFRNYSCLARHLRIHTGQKPYKCNVCGKVFNDSGNLSNHKRIHTGEKPFQCNECGKVFSYYSCLARHRKIHTGEKPYKCNDCGKAYTQRSSLTKHLIIHTGEKPYNCNEFGGAFIQSSKLARYHRNPTGEKPHKCSHCGRTFSHITGLTYHQRRHTGEMPYKCIECGQVFNSTSNLARHRRIHTGEKPYKCNECGKVFRHQSTLARHRSIHTGEKPYVCNECGKAFRVRSILVNHQKMHTGDKPYKCNECGKAFIERSKLVYHQRNHTGEKPYKCIECGKAFGRFSCLNKHQMIHSGEKPYKCNECGKSFISRSGLTKHQTKHTAESLKTKFNVEKPLDVLLTSGFK

SEQ ID NO: 16454 - protein, 531 aa, Homo sapiens
MEAPAQKAGQGGLPKADAQGASGAREKRPEEPRPLEEDRAGSRPTQKGDLRGAAGGRTTPPGGGSRGCSLGVSPGPGTRHSAGTRPLVREPCGPTSSQNPELVIPEGLQAREGPCRSPARGGDCSRNSCLAWHRGAPAGETPPVCDPCPERIQNHPRTQLCEVHTDCWPCQPGTGAPTCPRTPKPTSRGRNPLVEQPRACACGEAFAWRALRIPQERLQATEEPRPCARCGKRFRPNQQQQAGKSPPVCPECGQTSRPRPIVPDPPAQRLYACDECGKAFTRTSSLLQHQRIHTGERPYECAECGKAFVRCSGLYRHQKTHSAERHRRGPVLARRAFRLGCPPCGDYSERSPRRGSGAGEKPYECADCAKAFGLFSHLVEHRRVHTGEKPYACPECGKAFNQRSNLSRHQRTHSSAKPYACPLCEKAFKGRSGLVQHQRAHTGERPYGCSECGKTFRGCSELRQHERLHSGEKPYICRDCGKAFVRNCSLVRHLRTHTGERPYACGDCGRAFSQRSNLNEHRKRHGGRAAP

SEQ ID NO: 16455 - protein, 811 aa, Homo sapiens
MLLPTTIQPQTARKSQLPRGNSCLVGLHIASPQLLRVQPLVRTEPQSCFLSDLCQPPAQGFVQRPLPALQVVPAKRVPAPKAPDEQGSMLTPLSASDPLAVTSLSSSSAHPFISNLHTRHTEKLKKSLKVKTRSGRVSRPPKYKAKDYKFIKTEDLADGHLSDSDDYSELCVEEDEDQRERHALFDLSSCSLRPKSFKCQTCEKSYIGKGGLARHFKLNPGHGQLDPEMVLSEKASGSTLRGCTEERTLSLTSLGLSMPADPCEGGARSCLVTESARGGLQNGQSVDVEETLPSEPENGALLRSERYQGPRRRACSETLAESRTAVLQQRRAAQLPGGPAAAGEQRASPSKARLKEFLQQCDREDLVELALPQLAQVVTVYEFLLMKVEKDHLAKPFFPAIYKEFEELHKMVKKMCQDYLSSSGLCSQETLEINNDKVAESLGITEFLRKKEIHPDNLGPKHLSRDMDGEQLEGASSEKREREAAEEGLASVKRPRREALSNDTTESLAANSRGREKPRPLHALAAGFSPPVNVTVSPRSEESHTTTVSGGNGSVFQAGPQLQALANLEARRGSIGAALSSRDVSGLPVYAQSGEPRRLTQAQVAAFPGENALEHSSDQDTWDSLRSPGFCSPLSSGGGAESLPPGGPGHAEAGHLGKVCDFHLNHQQPSPTSVLPTEVAAPPLEKILSVDSVAVDCAYRTVPKPGPQPGPHGSLLTEGCLRSLSGDLNRFPCGMEVHSGQRELESVVAVGEAMAFEISNGSHELLSQGQKQIFIQTSDGLILSPPGTIVSQEEDIVTVTDAEGRACGWAR

SEQ ID NO: 16456 - protein, 738 aa, Homo sapiens
MTMLQESFSFDDLSVDFTQKEWQLLDPSQKNLYKDVMLENYSSLVSLGYEVMKPDVIFKLEQGEEPWVGDGEIPSSDSPEVWKVDGNMMWHQDNQDKLKIIKRGHECDAFGKNFNLNMNFVPLRKSNSEGDLDGLILKHHLDLLIPKGDYGKAESDDFNVFDNFFLHSKPEDTDTWLKYYDCDKYKESYKKSQIIIYHRNRLGEKLYECSECRKRFSKKPSLIKHQSRHIRDIAFGCGNCGKTFPQKSQFITHHRTHTGEKPYNCSQCGKAFSQKSQLTSHQRTHTGEKPYECGECGKAFSRKSHLISHWRTHTGEKPYGCNECGRAFSEKSNLINHQRIHTGEKPFECRECGKAFSRKSQLVTHHRTHTGTKPFGCSDCRKAFFEKSELIRHQTIHTGEKPYECSECRKAFRERSSLINHQRTHTGEKPHGCIQCGKAFSQKSHLISHQMTHTGEKPFICSKCGKAFSRKSQLVRHQRTHTGEKPYECSECGKAFSEKLSLTNHQRIHTGEKPYVCSECGKAFCQKSHLISHQRTHTGEKPYECSECGKAFGEKSSLATHQRTHTGEKPYECRDCEKAFSQKSQLNTHQRIHTGEKPYECSLCRKAFFEKSELIRHLRTHTGEKPYECNECRKAFREKSSLINHQRIHTGEKPFECSECGKAFSRKSHLIPHQRTHTGEKPYGCSECRKAFSQKSQLVNHQRIHTGEKPYRCIECGKAFSQKSQLINHQRTHTVKKS

SEQ ID NO: 16457 - protein, 716 aa, Homo sapiens
MSLMGHGKVEMLLYAVPLLKAPNCLSSSMQLPHGGGRHQELVRFRDVAVVFSPEEWDHLTPEQRNLYKDVMLDNCKYLASLGNWTYKAHVMSSLKQGKEPWMMEREVTGDPCPACQPALATFRALNESGNAFRQSFHHGEYRTHRTFVQHYECDDCGMAFGHVSQLTGHQKIHKVGETHEYGENTRGFRHRSSFTMLQRICTLYKHFECNQCGETFNRPSKVIQHQSMHSGLKPYKCDVCQKAFRFLSSLSIHQRFHVGNRVNLTRHQKTHTQRKPFSCNFCGKTFHRFSEKTQHLLIHTRKKYYTCNYCKKEFNPYSKFILHQRTHTGEKPHKCDVCEKSFKSISNLNKHQKTHTGEKPFSCNECKKTFAQRTDLARHQQIHTGKKSFICSSCKKTFVRLSDLTQHKGTHTGERPYQCTTCEKAFKYRSNFTKHQKTHSIGRPFACNECGKTYRLNWELNQHKKIHTGEKPYECGECGKRFNNNSNLNKHKKIHTGEKHFVCNQCGKAFSLNSKLSRHQRTHNKKENSSKSVSNLNKHQKTHAGEKPFPCNECKKAFAQRMDLARHQQIHTGRKPFICSSCKKTFVRLSDLTQHKGTHTGERPYQCTTCEKAFKYQSNFTKHQKTHSIGRPFTCNECGKTFRLNWKLNQHKKIHTGEKPYECGECGKCFNNNSNLSKHKKIHTGEKHFVCNQCGKAFSLNSKLSRHQITHNKKKP

SEQ ID NO: 16458 - protein, 808 aa, Homo sapiens
MLEGHESYDTENFYFREIRKNLQEVDFQWKDGEINYKEGPMTHKNNLTGQRVRHSQGDVENKHMENQLILRFQSGLGELQKFQTAEKIYGCNQIERTVNNCFLASPLQRIFPGVQTNISRKYGNDFLQLSLPTQDEKTHIREKPYIGNECGKAFRVSSSLINHQMIHTTEKPYRCNESGKAFHRGSLLTVHQIVHTRGKPYQCDVCGRIFRQNSDLVNHRRSHTGDKPYICNECGKSFSKSSHLAVHQRIHTGEKPYKCNRCGKCFSQSSSLATHQTVHTGDKPYKCNECGKTFKRNSSLTAHHIIHAGKKPYTCDVCGKVFYQNSQLVRHQIIHTGETPYKCNECGKVFFQRSRLAGHRRIHTGEKPYKCNECGKVFSQHSHLAVHQRVHTGEKPYKCNECGKAFNWGSLLTVHQRIHTGEKPYKCNVCGKVFNYGGYLSVHMRCHTGEKPLHCNKCGMVFTYYSCLARHQRMHTGEKPYKCNVCGKVFIDSGNLSIHRRSHTGEKPFQCNECGKVFSYYSCLARHRKIHTGEKPYKCNDCGKAYTQRSSLTKHLVIHTGENPYHCNEFGEAFIQSSKLARYHRNPTGEKPHKCSECGRTFSHKTSLVYHQRRHTGEMPYKCIECGKVFNSTTTLARHRRIHTGEKPYKCNECGKVFRYRSGLARHWSIHTGEKPYKCNECGKAFRVRSILLNHQMMHTGEKPYKCNECGKAFIERSNLVYHQRNHTGEKPYKCMECGKAFGRRSCLTKHQRIHSSEKPYKCNECGKSYISRSGLTKHQIKHAGENLTTKLNVERPLDVVLTSGIPK

SEQ ID NO: 16459 - protein, 348 aa, Homo sapiens
MRSLPFALTVESVSARAPTCCSTGRFTQGRQPCKCKACGRGFTQSASLLQHWRVHSDWRETLSLSPVRQDLLWPLQPHQAPASPLGRSHSSAGVRQGFSGQLCCWLTKEHTLAEALRLSPVPAGFWGPVEADRPPANSHRRVCPFCCCSCGDSVNEKTSLSQRVLPHPGEKTCRGGSVESVSLAPSSVAPDSTSGLRPCGSPGSFLQHLPPSTLLPRPPFLYPGPPLSLQPLVPSGLPAVPAVPLGGLEVAQVPPATQPAAQQEGAMGPRSCASAGRDSREAVQAPGYPEPARKASQHRAAGPLGEARARLQRQCRAPPPPSNPHWRGALPVFPVWKASSRRSNLARH

SEQ ID NO: 16460 - protein, 666 aa, Homo sapiens
MDLVAFEDVAVNFTQEEWSLLDPSQKNLYREVMQETLRNLASIGEKWKDQNIEDQYKNPRNNLRSLLGERVDENTEENHCGETSSQIPDDTLNKKTSPGVKSCESSVCGEVFVGHSSLNRHIRADTAHKPSEYQEYGQEPYKCQQRKKAFRCHPSFQMQEKAHTGEKLYDCKECGKTFISHSSIQRHMIMHNGDGTYKCKFCGKACPCLSIYLIHERVHTGEKPYKCKQCGKAFSYSTSLQIHERTHTGEKPYECKECGKAFGSPNSLYEHRRTHTGEKPYECKQCGKAFRWFHSFQIHERTHSEEKAYECTKCGKAFKCPSYLCRHEVTHSGKKPCECKQCGKALSYLNFQRHMKMHTRMRPYKCKTVEKPLILPVRFEDMKELTLERNLMNASTVVKPSIVPVPFTIMKGLTLERNPMNVSSVVKPSFLPLPFDIMKGLTLERNRMSVSNVGKPSDLPHTFKCMEGLTLKRNPMNVSSVVKPSFFPLPFDIMKGLTLERNPMSVSNVGKPSHLPHTFKCMKGLTLESNCMNLNNVKKPLDLSETFKFMKRHTLERNPIRNMEKHSTISLPFKYMQQCTEDRMPMNVKSVTKHSYLPRSFEYMQEHTLERNPMNVRNAEKRSIIFLLCVYTKGCTLERNHINVRIVGKHSVCLVPFVDIKGLTLE

SEQ ID NO: 16461 - protein, 970 aa, Homo sapiens
MALSQGLLTFRDVAIEFSQEEWKCLDPAQRTLYRDVMLENYRNLVSLDISSKCMMKEFSSTAQGNTEVIHTGTLQRHERHHIGDFCFQEMEKDIHDFEFQWKEDERNSHEAPMTEIKQLTGSTNRHDQRHAGNKPIKDQLGSSFHSHLPELHMFQTEGKIGNQVEKSINSASLVSTSQRISCRPKTHISKNYGNNFLNSSLLTQKQEVHMREKSFQCNESGKAFNYSSVLRKHQIIHLGAKQYKCDVCGKVFNQKRYLACHRRCHTGKKPYKCNDCGKTFSQELTLTCHHRLHTGEKHYKCSECGKTFSRNSALVIHKAIHTGEKSYKCNECGKTFSQTSYLVYHRRLHTGEKPYKCEECDKAFSFKSNLERHRKIHTGEKPYKCNECSRTFSRKSSLTRHRRLHTGEKPYKCNDCGKTFSQMSSLVYHRRLHTGEKPYKCEECDEAFSFKSNLERHRRIHTGEKPYKCNDCGKTFSQTSSLVYHRRLHTGEKPYKCEECDEAFSFKSNLERHRIIHTGEKLYKCNECGKTFSRKSSLTRHCRLHTGEKPYQCNECGKAFRGQSALIYHQAIHGIGKLYKCNDCHQVFSNATTIANHWRIHNEERSYKCNRCGKFFRHRSYLAVHWRTHSGEKPYKCEECDEAFSFKSNLQRHRRIHTGEKPYRCNECGKTFSRKSYLTCHRRLHTGEKPYKCNECGKTFGRNSALIIHKAIHTGEKPYKCNECGKAFSQKSSLTCHLRLHTGEKPYKCEECDKVFSRKSSLEKHRRIHTGEKPYKCKVCDKAFGRDSHLAQHTRIHTGEKPYKCNECGKNFRHNSALVIHKAIHSGEKPYKCNECGKTFRHNSALEIHKAIHTGEKPYKCSECGKVFNRKANLSRHHRLHTGEKPYKCNKCGKVFNQQAHLACHHRIHTGEKPYKCNECGKTFRHNSVLVIHKTIHTGEKPYKCNECGKVFNRKAKLARHHRIHTGKKH

SEQ ID NO: 16462 - protein, 533 aa, Homo sapiens
MDSSQHLVTFEDVAVDFTQEEWTLLDQAQRDLYRDVMLENYKNLIILAGSELFKRSLMSGLEQMEELRTGVTGVLQELDLQLKTKGSPLLQDISAERSPNGVQLERSNTAEKLYDSNHSGKVFNEHPFLMTHMITHIGEKTSEDNQSGKALRKNFPHSFYKKSHAEGKMPKCVKHEKAFNQFPNLTRQNKTHTQEKLCECKDCWRTFLNQSSLKLHIRSHNGDKHYVCKECGKAFSNSSHLIGHGRIHSGEKPYVCKECGKAFTQSTGLKLHIRTHSGEKPYKCKECGKAFTHSSYLTDHTRIHSGKKPYVCMECGKAFTRSTGLILHMRIHTGEKPYECKECGKAFIHSSYLTKHVRIHSGEKLYLCKACGKAFTRSSGLVLHMRTHTGEKPYECKECGKAFNNSSMLSQHVRIHTGEKPYECKECGKAFTQSSGLSTHLRTHTGEKACECKECGKAFARSTNLNMHMRTHTGEKPYACKECGKAFRYSTYLNVHTRTHTGAKPYECKKCGKNFTQSSALAKHLRTKACEKT

SEQ ID NO: 16463 - protein, 595 aa, Homo sapiens
MGPLTFRDVAIEFSLKEWQCLDTAQRNLYRNVMLENYRNLVFLGITVSKPDLITCLEQGKEAWSMKRHEIMVAKPTVMCSHFAQDLWPEQNIKDSFQKVTLKRYGKCRHENLPLRKGCESMDECKMHKGGCNGLNQCLTATQSKIFQCDKYVKVAHKFSNSNRHEIRHTKKKPFKCTKCGKSFGMISCLTEHSRIHTRVNFYKCEECGKAFNWSSTLTKHKRIHTGEKPYKCEECGKAFNQSSNLIKHKKIHTGEKPYKCEECGKTFNRFSTLTTHKIIHTGEKPYKCKECGKAFNRSSTLTTHRKIHTGEKPYKCEECGKAFKQSSNLTTHKIIHTGEKPYKCKKCGKAFNQSAHLTTHEVIHTGEKPYKCEKCGKAFNHFSHLTTHKIIHTGEKPYKCKECGKAFKHSSTLTKHKIIHTGEKPYKCKECEKAFNQSSKLTEHKKIHTGEKPYECEKCGKAFNQSSNLTRHKKSHTEEKPYKCEECGKGFKWPSTLTIHKIIHTGEKPYKCEECGKAFNQSSKLTKHKKIHTGEKPYTCEECGKAFNQSSNLTKHKRIHTGEKPYKCEECDKAFKWSSVLTKHKIIHTGEKLQI

SEQ ID NO: 16464 - protein, 659 aa, Homo sapiens
MLHQPTPGNRGLTARMEVGPATETFVLELQCLEDGGPGPDTLSGGSGGSESQEEEEPQERNSSPQRPAVSAPVGASEIAEETRPGQRELQLQQLEQQPEPQQQPQHEQLQQPQPHLELQQQPQQDGQQQLSQLQQEKHQSVHHQELKPELQLMHQQQQLQPQQVQEQQRLQQQQEQLQTQQAQEQQVLQQQEQLQQQVQEQQLLQQQQEQLQQQQLLQQQEQLQQQQFQQQQEQLQQQQQLLLLQQQGQLQQQLLQQQQAQLQQQLLEQQQAQLQQQLLLQQQEQLQQQQQQQLLQQQQEQLQQQQLQPPPLEPEEEEEVELELMPVDLGSEQELEQQRQELERQQELERQQEQRQLQLKLQEELQQLEQQLEQQQQQLEQQEVQLELTPVELGAQQQEVQLELTPVQPELQLELVPAAGGGGAAVPGAPAAVVVAPPGYVVVQELMVLPAVAAPAVVAIPGPAGSAALTPARQRRRRRARDRPTICGECGKGFSRSTDLVRHQATHTGERPHRCGECGKGFSQHSNLVTHQRIHTGEKPYACSYCAKRFSESSALVQHQRTHTGERPYACGDCGKRFSVSSNLLRHRRTHSGERPYVCEDCGERFRHKVQIRRHERQLHGAGRSRGLGLLRASRPAALGGPARAEQAATATAPADKAL

SEQ ID NO: 16465 - protein, 632 aa, Homo sapiens
MLREEAAQKRKEKEPGMALPQGHLTFRDVAIEFSLEEWKCLDPTQRALYRAMMLENYRNLHSVDISSKCMMKKFSSTAQGNTEVDTGTLERHESHHIGDFCFQKIGKDIHDFEFQWQEDKRNSHEATMTQIKKLTGSTDRYDRRHPGNKPIKDQLGLSFHSHLPELHIFQTKGKVGNQVEKSINDASSVLTSQRISSRPKIHISNNYENNFFHSSLLTLKQEVHIREKSFQCNESGKAFNCSSLLRKHQIIYLGGKQYKCDVCGKVFNQKRYLACHHRCHTGEKPYKCNECGKVFNQQSNLASHHRLHTGEKPYKCEECDKVFSRKSNLERHRRIHTGEKPYKCKVCEKAFRRDSHLTQHTRIHTGEKPYKCNECGKAFSGQSTLIHHQAIHGIGKLYKCNDCHKVFSNATTIANHWRIHNEERSYKCNKCGKFFRRRSYLVVHWRTHTGEKPYKCNECGKTFHHNSALVIHKAIHTGEKPYKCNECGKTFRHNSALVIHKAIHTGEKPYKCNECGKVFNQQATLARHHRLHTGEKPYKCEECDTVFSRKSHHETHKRIHTGEKPYKCDDFDEAFSQASSYAKQRRIHMGEKHHKCDDCGKAFTSHSHRIRHQRIHTGQKSYKCHKRGKVFS

SEQ ID NO: 16466 - protein, 203 aa, Homo sapiens
MHTGEKPYTCEECVKLLTNPQALLYTGAFILNKNFTNVKNAAKPLLNPHPLINKRIHTGEKPYTCEECGKAFYRSSHLTEHKNIHTGEKSYKCEECGNAFYRSSHLTKHKRIHSGQKPYKCEECGKAFRQSSALNEHKKIHTAEKPYKCKECGKAFRWSRSLNEHTNIHIGEKPYTCEECGKDFTWSSTLTVHQRIQTGEKHS

SEQ ID NO: 16467 - protein, 531 aa, Homo sapiens
MDSVAFEDVAVNFTQEEWALLDPSQKNLYREVMQETLRNLTSIGKKWNNQYIEDEHQNPRRNLRRLIGERLSESKESHQHGEVLTQVPDDTLKKKTPGVQSYESSVCGEIGIGLSSLNRHLRAFSYSSSLAIHGRTHTGEKPYECKECGKAFRFPSSVRRHERIHSAKKPYECKQCGKAFSFPSSVRRHERIHSAKKPYECKQCGKALSYLVSFQTHMRMHTGERPHKCNICGKAFFSPSSLKRHEKSHTGEKRYKCKQCDKAFNCPSSFQYHERTHSGEKPYECTQCRKAFRSVKYLRVHERKHTGEKPYECKLCGKGFISSTSFRYHEKTHTGEKPYECKKCVKAFSFVKDLRIHERTHTGEKPFECKQCGKTFTSSNSFHYHERTHTGEKPYECKQCGKAFRSASVLQKHIRTHTGEKPYGCKQCGKVFRVASQLKMHERTHTGEKPYECKQCGKAFISSNSIRYHKRTHTGEKPYKCKQCGKAFISSNSFLYHERIHTGEKPYECKQCGKAFRSASILQKHVRTHAG

SEQ ID NO: 16468 - protein, 563 aa, Homo sapiens
MARRLLPAHVQESVTFRDVAVFFSQDEWLHLDSAQRALYREVMLENYSILVSLGILFSKPKVISQLEQGEDPWMVESGVPQGAHLGWESLFGTIVSKEENQEVMKKLIIDGTFDFKLEKTYINEDKLEKQQGKKNRLFSKVLVTIKKVYMKERSFKGVEFGKNLGLKSSLIRKPRIVSRGRRPRSQQYSVLFKQLGVNTVRKCYKCNICGKIFLHSSSLSKHQRIHTGEKLYKCKECRKAFSQSSSLTQHLRVHTGEKPYICSECGKAFSFTTSLIGHQRMHTGERPYKCKECGKTFKGSSSLNNHQRIHTGEKPYKCNECGRAFSQCSSLIQHHRIHTGEKPYECTQCGKAFTSISRLSRHHRIHTGEKPFHCNECGKVFSYHSALIIHQRIHTGEKPYACKECGKAFSQSSALIQHQRIHTGEKPYKCNECGKAFSWISRLNIHHRIHTGEKPYNCKECGKAFSSHSGVNTHRKIHTGEKPYKCNDCEKAFNQSSALIQHQRIHTGEKPYNCKVCGKAFRQSSSLMTHMRIHTGEKPYKCKECGKAFSQSSSLTNHQRTHN

SEQ ID NO: 16469 - protein, 577 aa, Homo sapiens
MLRRGHLAFRDVAIEFPQEEWKCLDPAQRTLYREVMVENYRNLVFLGICLPDLSVISMLEQRRDPRNLQSEVKIANNPGGRECIKGVNAESSSKLGSNAGNKSLKNQLGLTFQLHLSELQLFQAERNISGCKHVEKPINNSLVSPLQKIYSSVKSHILNKYRNDFDDSPFLPQEQKAQIREKPCECNEHGKAFRVSSRLANNQVIHTADNPYKCNECDKVFSNSSNLVQHQRIHTGEKPYKCHECGKLFNRISLLARHQRIHTGEKPYKCHECGKVFTQNSHLANHHRIHTGEKPYKCNECGKVFNRNAHLARHQKIHSGEKPYKCKECGKAFSGGSGLTAHLVIHTGEKLYKCNKCGKVFNRNAHLTRHQRIHTGEKPYECKECGKVFRHKFCLTNHHRMHTGEQPYKCNECGKAFRDCSGLTAHLLIHTGEKPYKCKECAKVFRHRLSLSNHQRFHTGEKPYRCDECGKDFTRNSNLANHHRIHTGEKPYKCSECHKVFSHNSHLARHRQIHTGEKSYKCNECGKVFSHKLYLKKHERIHTGEKPYRCHECGKDFTRNSNLANHHRIHTGEKPYR

SEQ ID NO: 16470 - protein, 544 aa, Homo sapiens
MAVMDLSSPWALTKQDSACFHLRNAEEERMIAVFLTTWLQEPMTFKDVAVEFTQEEWMMLDSAQRSLYRDVMLENYRNLTSVEYQLYRLTVISPLDQEEIRNMKKRIPQAICPDQKIQPKTKESTVQKILWEEPSNAVKMIKLTMHNWSSTLREDWECHKIRKQHKIPGGHWRQMIYAPKKTVPQELFRDYHELEENSKLGSKLIFSQSIFTSKHCQKCYSEIGCLKHNSIINNYVKNSISEKLYESHECDTTLWHFQRNQTVQKEYTYSKHGMHFTHNMFPVPNNLHMAQNACECNKDETLCHQSSLKKQGQTHTEKKHECNQCGKAFKRISNLTLYKKSHMGEKQYECKECGKVFNDSSTLRRHVRTHTGEKPYECNQCGKAFSQKTSLKAHMRTHTGEKPYECNQCGKSFGTSSYLIVHKRIHTGEKLYECSECGKAFNTSSHLKVHKKIHTGENVYECSDCGKVFSGVSSLRMHIRTHTGEKPYECKECRKAFSVSSSLRRHVRIHTGEKPYECIQCGKAFSQSSSLIIHKRIHTERETL

SEQ ID NO: 16471 - protein, 601 aa, Homo sapiens
MGPLEFRDVAIEFSLEEWHCLDTAQQNLYRDVMLENYRHLVFLGIVVTKPDLITCLEQGKKPFTVKRHEMIAKSPVMCFHFAQDLCPEQSLKDSFQKVIVTRYEKREYGNLELKKGCESVDEGKVHKRGYNGLNQCLTATQSKVFQCDTYVKVSHIFSNSNRHKIRDTGKKPFKCIECGKAFNQSSTLATHKKIHTGEITCKCEECGKAFNRSSHLTSHKRIHTGEKRYKCEDCGKELKYSSTLTAHKRIHTGEKRYKCEDCGKELKYSSTLTAHKRIHTGEKPYKCDKCGRAFISSSILYVHKISHTEEKPYKCEECGKAFKLSSILSTHKRIHTGEKPYKCEECGKAFRRSLVLRTHKRIHTGEKPYKCDKCGKAFISSSLLYKHKISHSEKKPYKCEECGKAFKRSSTLTIHKISHTEEKPYKCQECDKVFKRSSALSTHKIIHSGEKPYKCEECGKAFKRSSNLTTHKISHTEEKLYKCQECDKAFKYSSALSTHKIIHSGENPYKCEECGKAFKRSSVLSKHKIIHTGAKPYKCEECGKAFKRSSQLTSHKISHTGEKPYKCEECGKAFNLSSDLNTHKRIHIGQKAYIVKNMANL

SEQ ID NO: 16472 - protein, 1191 aa, Homo sapiens
MPGTPGSLEMGLLTFRDVAIEFSPEEWQCLDTAQQNLYRNVMLENYRNLAFLGIALSKPDLITYLEQGKEPWNMKQHEMVDEPTGICPHFPQDFWPEQSMEDSFQKVLLRKYEKCGHENLQLRKGCKSVDECKVHKEGYNKLNQCLTTAQSKVFQCGKYLKVFYKFLNSNRHTIRHTGKKCFKCKKCVKSFCIRLHKTQHKCVYITEKSCKCKECEKTFHWSSTLTNHKEIHTEDKPYKCEECGKAFKQLSTLTTHKIICAKEKIYKCEECGKAFLWSSTLTRHKRIHTGEKPYKCEECGKAFSHSSTLAKHKRIHTGEKPYKCEECGKAFSRSSTLAKHKRIHTGEKPYKCKECGKAFSNSSTLANHKITHTEEKPYKCKECDKAFKRLSTLTKHKIIHAGEKLYKCEECGKAFNRSSNLTIHKFIHTGEKPYKCEECGKAFNWSSSLTKHKRFHTREKPFKCKECGKAFIWSSTLTRHKRIHTGEKPYKCEECGKAFRQSSTLTKHKIIHTGEKPYKFEECGKAFRQSLTLNKHKIIHSREKPYKCKECGKAFKQFSTLTTHKIIHAGKKLYKCEECGKAFNHSSSLSTHKIIHTGEKSYKCEECGKAFLWSSTLRRHKRIHTGEKPYKCEECGKAFSHSSALAKHKRIHTGEKPYKCKECGKAFSNSSTLANHKITHTEEKPYKCKECDKTFKRLSTLTKHKIIHAGEKLYKCEECGKAFNRSSNLTIHKFIHTGEKPYKCEECGKAFNWSSSLTKHKRIHTREKPFKCKECGKAFIWSSTLTRHKRIHTGEKPYKCEECGKAFSRSSTLTKHKTIHTGEKPYKCKECGKAFKHSSALAKHKIIHAGEKLYKCEECGKAFNQSSNLTTHKIIHTKEKPSKSEECDKAFIWSSTLTEHKRIHTREKTYKCEECGKAFSQPSHLTTHKRMHTGEKPYKCEECGKAFSQSSTLTTHKIIHTGEKPYKCEECGKAFRKSSTLTEHKIIHTGEKPYKCEECGKAFSQSSTLTRHTRMHTGEKPYKCEECGKAFNRSSKLTTHKIIHTGEKPYKCEECGKAFISSSTLNGHKRIHTREKPYKCEECGKAFSQSSTLTRHKRLHTGEKPYKCGECGKAFKESSALTKHKIIHTGEKPYKCEKCGKAFNQSSILTNHKKIHTITPVIPLLWEAEAGGSRGQEMETILANTVKPLLY

SEQ ID NO: 16473 - protein, 586 aa, Homo sapiens
MGPLTFRDVKIEFSLEEWQCLDTAQRNLYRDVMLENYRNLVFLGIAVSKPDLITWLEQGKEPWNLKRHEMVDKTPVMCSHFAQDVWPEHSIKDSFQKVILRTYGKYGHENLQLRKDHKSVDACKVYKGGYNGLNQCLTTTDSKIFQCDKYVKVFHKFPNVNRNKIRHTGKKPFKCKNRGKSFCMLSQLTQHKKIHTREYSYKCEECGKAFNWSSTLTKHKIIHTGEKPYKCEECGKAFNRSSNLTKHKIIHTGEKPYKCEECGKAFNRSSTLTKHKRIHTEEKPYKCEECGKAFNQFSILNKHKRIHMEDKPYKCEECGKAFRVFSILKKHKIIHTGEKPYKCEECGKAFNQFSNLTKHKIIHTGEKPYKCDECGKAFNQSSTLTKHKRIHTGEKPYKCEECGKAFKQSSTLTEHKIIHTGEKPYKCEKCGKAFSWSSAFTKHKRNHMEDKPYKCEECGKAFSVFSTLTKHKIIHTREKPYKCEECGKAFNQSSIFTKHKIIHTEGKSYKCEKCGNAFNQSSNLTARKIIYTGEKPYKYEECDKAFNKFSTLITHQIIYTGEKPCKHECGRAFNKSSNYTKEKLQT

SEQ ID NO: 16474 - protein, 620 aa, Homo sapiens
MGPLQFRDVAIEFSLEEWHCLDTAQRNLYRNVMLENYSNLVFLGIVVSKPDLIAHLEQGKKPLTMKRHEMVANPSVICSHFAQDLWPEQNIKDSFQKVILRRYEKRGHGNLQLIKRCESVDECKVHTGGYNGLNQCSTTTQSKVFQCDKYGKVFHKFSNSNRHNIRHTEKKPFKCIECGKAFNQFSTLITHKKIHTGEKPYICEECGKAFKYSSALNTHKRIHTGEKPYKCDKCDKAFIASSTLSKHEIIHTGKKPYKCEECGKAFNQSSTLTKHKKIHTGEKPYKCEECGKAFNQSSTLTKHKKIHTGEKPYVCEECGKAFKYSRILTTHKRIHTGEKPYKCNKCGKAFIASSTLSRHEFIHMGKKHYKCEECGKAFIWSSVLTRHKRVHTGEKPYKCEECGKAFKYSSTLSSHKRSHTGEKPYKCEECGKAFVASSTLSKHEIIHTGKKPYKCEECGKAFNQSSSLTKHKKIHTGEKPYKCEECGKAFNQSSSLTKHKKIHTGEKPYKCEECGKAFNQSSTLIKHKKIHTREKPYKCEECGKAFHLSTHLTTHKILHTGEKPYRCRECGKAFNHSATLSSHKKIHSGEKPYECDKCGKAFISPSSLSRHEIIHTGEKP

SEQ ID NO: 16475 - protein, 572 aa, Homo sapiens; identical to SEQ ID NO: 14467

SEQ ID NO: 16476 - protein, 864 aa, Homo sapiens
MGSLTFWDVTIEFALEEWQCLDMAQQNLYRNVMLENYRNLVFLGIAVSKLDLITCLKQGKEPWNMKRHEMVTKPPVISSHFTQDFWPDQSIKDSFQEIILRTYARCGHKNLRLRKDCESVNEGKMHEEAYNKLNQCWTTTQGKIFQCNKYVKVFHKYSNSNRYKIRHTKKKTFKCMKCSKSFFMLSHLIQHKRIHTRENIYKCEERGKAFKWFSTLIKHKIIHTEDKPYKYKKCGKAFNISSMFTKCKIIHTGKKPCKCEECGKVFNNSSTLMKHKIIHTGKKPYKCEECGKAFKQSSHLTRHKAIHTGEKPYKCEECGKAFNHFSALRKHQIIHTGKKPYKCEECGKAFSQSSTLRKHEIIHTEEKPYKYEECGKAFSNLSALRKHEIIHTGQKPYKCEECGKAFKWSSKLTVHKVIHTAEKPCKCEECGKAFKRFSALRKHKIIHTGKQPYKCEECSKAFSNFSALRKHEIIHTGEKPYKCEECGKAFKWSSKLTVHKVIHMEEKPCKCEECGKAFKHFSALRKHKIIHTGKKPYKCEECGKAFNNSSTLMKHKIIHTGKKPYKCEECGKAFKQSSHLTRHKAIHTGEKPYKCEECGKAFNHFSALRKHQIIHTGKKPYKCEECGKAFSQSSTLRKHEIIHTGEKPYKCEECGKAFKWSSHLTRHKVIHTEEKPYKCEECGKAFNHFSALRKHKIIHTGKKPYKCEECGKAFSQSSTLRKHEIIHTGEKPYKCEECGKAFKWSSKLTVHKVIHTAEKPCKCEECGKAFKHFSALRKHKIIHTGKKPYKCEECGKAFNNSSTLRKHEIIHTGEKSYKCEECGKAFQWSSKLTLHKVIHMERNPANVKNVAKLLNISQPLENMR

SEQ ID NO: 16477 - protein, 1918 aa, Homo sapiens
MEERRPHLDARPRNSHTNHRGPVDGELPPRARNQANNPPANALRGGASHPGRHPRANNHPAAYWQREERFRAMGRNPHQGRRNQEGHASDEARDQRHDQENDTRWRNGNQDCRNRRPPWSNDNFQQWRTPHQKPTEQPQQAKKLGYKFLESLLQKDPSEVVITLATSLGLKELLSHSSMKSNFLELICQVLRKACSSKMDRQSVLHVLGILKNSKFLKVCLPAYVVGMITEPIPDIRNQYPEHISNIISLLQDLVSVFPASSVQETSMLVSLLPTSLNALRASGVDIEEETEKNLEKVQTIIEHLQEKRREGTLRVDTYTLVQPEAEDHVESYRTMPIYPTYNEVHLDERPFLRPNIISGKYDSTAIYLDTHFRLLREDFVRPLREGILELLQSFEDQGLRKRKFDDIRIYFDTRIITPMCSSSGIVYKVQFDTKPLKFVRWQNSKRLLYGSLVCMSKDNFETFLFATVSNREQEDLCRGIVQLCFNEQSQQLLAEVQPSDSFLMVETTAYFEAYRHVLEGLQEVQEEDVPFQRNIVECNSHVKEPRYLLMGGRYDFTPLIENPSATGEFLRNVEGLRHPRINVLDPGQWPSKEALKLDDSQMEALQFALTRELAIIQGPPGTGKTYVGLKIVQALLTNESVWQISLQKFPILVVCYTNHALDQFLEGIYNCQKTSIVRVGGRSNSEILKQFTLRELRNKREFRRNLPMHLRRAYMSIMTQMKESEQELHEGAKTLECTMRGVLREQYLQKYISPQHWESLMNGPVQDSEWICFQHWKHSMMLEWLGLGVGSFTQSVSPAGPENTAQAEGDEEEEGEEESSLIEIAEEADLIQADRVIEEEEVVRPQRRKKEESGADQELAKMLLAMRLDHCGTGTAAGQEQATGEWQTQRNQKKKMKKRVKDELRKLNTMTAAEANEIEDVWQLDLSSRWQLYRLWLQLYQADTRRKILSYERQYRTSAERMAELRLQEDLHILKDAQVVGMTTTGAAKYRQILQKVEPRIVIVEEAAEVLEAHTIATLSKACQHLILIGDHQQLRPSANVYDLAKNFNLEVSLFERLVKVNIPFVRLNYQHRMCPEIARLLTPHIYQDLENHPSVLKYEKIKGVSSNLFFVEHNFPEQEIQEGKSHQNQHEAHFVVELCKYFLCQEYLPSQITILTTYTGQLFCLRKLMPAKTFAGVRVHVVDKYQGEENDIILLSLVRSNQEGKVGFLQISNRICVALSRAKKGMYCIGNMQMLAKVPLWSKIIHTLRENNQIGPMLRLCCQNHPETHTLVSKASDFQKVPEGGCSLPCEFRLGCGHVCTRACHPYDSSHKEFQCMKPCQKVICQEGHRCPLVCFQECQPCQVKVPKTIPRCGHEQMVPCSVPESDFCCQEPCSKSLRCGHRCSHPCGEDCVQLCSEMVTIKLKCGHSQPVKCGHVEGLLYGGLLVKCTTKCGTILDCGHPCPGSCHSCFEGRFHERCQQPCKRLLICSHKCQEPCIGECPPCQRTCQNRCVHSQCKKKCGELCSPCVEPCVWRCQHYQCTKLCSEPCNRPPCYVPCTKLLVCGHPCIGLCGEPCPKKCRICHMDEVTQIFFGFEDEPDARFVQLEDCSHIFEVQALDRYMNEQKDDEVAIRLKVCPICQVPIRKNLRYGTSIKQRLEEIEIIKEKIQGSAGEIATSQERLKALLERKSLLHQLLPEDFLMLKEKLAQKNLSVKDLGLVENYISFYDHLASLWDSLKKMHVLEEKRVRTRLEQVHEWLAKKRLSFTSQELSDLRSEIQRLTYLVNLLTRYKIAEKKVKDSIAVEVYSVQNILEKTCKFTQEDEQLVQEKMEALKATLPCSGLGISEEERVQIVSAIGYPRGHWFKCRNGHIYVIGDCGGAMERGTCPDCKEVIGGTNHTLERSNQLASEMDGAQHAAWSDTANNLMNFEEIQGMM

SEQ ID NO: 16478 - protein, 408 aa, Homo sapiens
MLPRPKAPASPRRPQTPTPSEQDADPGPASPRDTEAQRLRFRQFQYHVASGPHLALGQLWTLCRQWLRPEARSKEQMLELLVLEQFLGALPSKMRTWVQSQGPRSCREAASLVEDLTQMCQQEVLVSLDSVEPQDWSFGEEEDGKSPRSQKEPSQASELILDAVAAAPALPEESEWLETTQLQQSLHTRAEAEAPRAPGLLGSRARLPLKPSIWDEPEDLLAGPSSDLRAEGTVISSPKGPSAQRISPRRRNRNTDQSGRHQPSLKHTKGGTQEAVAGISVVPRGPRGGRPFQCADCGMVFTWVTHFIEHQKTHREEGPFPCPECGKVFLHNSVLTEHGKIHLLEPPRKKAPRSKGPRESVPPRDGAQGPVAPRSPKRPFQCSVCGKAFPWMVHLIDHQKLHTAHGHM

SEQ ID NO: 16479 - protein, 725 aa, Homo sapiens
MGPRASLSRLRELCGHWLRPALHTKKQILELLVLEQFLSVLPPHLLGRLQGQPLRDGEEVVLLLEGIHREPSHAGPLDFSCNAGKSCPRADVTLEEKGCASQVPSHSPKKELPAEEPSVLGPSDEPPRPQPRAAQPAEPGQWRLPPSSKQPLSPGPQKTFQALQESSPQGPSPWPEESSRDQELAAVLECLTFEDVPENKAWPAHPLGFGSRTPDKEEFKQEEPKGAAWPTPILAESQADSPGVPGEPCAQSLGRGAAASGPGEDGSLLGSSEILEVKVAEGVPEPNPELQFICADCGVSFPQLSRLKAHQLRSHPAGRSFLCLCCGKSFGRSSILKLHMRTHTDERPHACHLCGHRFRQSSHLSKHLLTHSSEPAFLCAECGRGFQRRASLVQHLLAHAQDQKPPCAPESKAEAPPLTDVLCSHCGQSFQRRSSLKRHLRIHARDKDRRSSEGSGSRRRDSDRRPFVCSDCGKAFRRSEHLVAHRRVHTGERPFSCQACGRSFTQSSQLVSHQRVHTGEKPYACPQCGKRFVRRASLARHLLTHGGPRPHHCTQCGKSFGQTQDLARHQRSHTGEKPCRCSECGEGFSQSAHLARHQRIHTGEKPHACDTCGHRFRNSSNLARHRRSHTGERPYSCQTCGRSFRRNAHLRRHLATHAEPGQEQAEPPQECVECGKSFSRSCNLLRHLLVHTGARPYSCTQCGRSFSRNSHLLRHLRTHARETLY

SEQ ID NO: 16480 - protein, 604 aa, Homo sapiens
MASTWAIQAHMDQDEPLEVKIEEEKYTTRQDWDLRKNNTHSREVFRQYFRQFCYQETSGPREALSRLRELCHQWLRPETHTKEQILELLVLEQFLTILPEELQAWVQEQHPESGEEVVTVLEDLERELDEPGEQVSVHTGEQEMFLQETVRLRKEGEPSMSLQSMKAQPKYESPELESQQEQVLDVETGNEYGNLKQEVSEEMEPHGKTSSKFENDMSKSARCGETREPEEITEEPSACSREDKQPTCDENGVSLTENSDHTEHQRICPGEESYGCDDCGKAFSQHSHLIEHQRIHTGDRPYKCEECGKAFRGRTVLIRHKIIHTGEKPYKCNECGKAFGRWSALNQHQRLHTGEKHYHCNDCGKAFSQKAGLFHHIKIHTRDKPYQCTQCNKSFSRRSILTQHQGVHTGAKPYECNECGKAFVYNSSLVSHQEIHHKEKCYQCKECGKSFSQSGLIQHQRIHTGEKPYKCDVCEKAFIQRTSLTEHQRIHTGERPYKCDKCGKAFTQRSVLTEHQRIHTGERPYKCDECGNAFRGITSLIQHQRIHTGEKPYQCDECGKAFRQRKKTSYKEILLKNHSEPQAGVNLLLSSLIPEWQSCFRRDL

SEQ ID NO: 16481 - protein, 348 aa, Homo sapiens
MTTALEPEDQKGLLIIKAEDHYWGQDSSSQKCSPHRRELYRQHFRKLCYQDAPGPREALTQLWELCRQWLRPECHTKEQILDLLVLEQFLSILPKDLQAWVRAHHPETGEEAVTVLEDLERELDEPGKQVPGNSERRDILMDKLAPLGRPYESLTVQLHPKKTQLEQEAGKPQRNGDKTRTKNEELFQKEDMPKDKEFLGEINDRLNKDTPQHPKSKDIIENEGRSEWQQRERRRYKCDECGKSFSHSSDLSKHRRTHTGEKPYKCDECGKAFIQRSHLIGHHRVHTGVKPYKCKECGKDFSGRTGLIQHQRIHTGEKPYECDECGRPFRVSSALIRHQRIHTANKLY

SEQ ID NO: 16482 - protein, 510 aa, Homo sapiens
MLPLEKAFASPRSSPAPPDLPTPGSAAGVQQEEPETIPERTPADLEFSRLRFREFVYQEAAGPHQTLARLHELCRQWLMPEARSKEQMLELLVLEQFLGILPDKVRPWVVAQYPESCKKAASLVEGLADVLEEPGMLLGSPAGSSSILSDGVYERHMDPLLLPGELASPSQALGAGEIPAPSETPWLSPDPLFLEQRRVREAKTEEDGPANTEQKLKSFPEDPQHLGEWGHLDPAEENLKSYRKLLLWGYQLSQPDAASRLDTEELRLVERDPQGSSLPEGGRRQESAGCACEEAAPAGVLPELPTEAPPGDALADPPSGTTEEEEEQPGKAPDPQDPQDAESDSATGSQRQSVIQQPAPDRGTAKLGTKRPHPEDGDGQSLEGVSSSGDSAGLEAGQGPGADEPGLSRGKPYACGECGEAFAWLSHLMEHHSSHGGRKRYACQGCWKTFHFSLALAEHQKTHEKEKSYALGGARGPQPSTREAQAGARAGGPPESVEGEAPPAPPEAQR

SEQ ID NO: 16483 - protein, 614 aa, Homo sapiens
MMAADIPRVTTPLSSLVQVPQEEDRQEEEVTTMILEDDSWVQEAVLQEDGPESEPFPQSAGKGGPQEEVTRGPQGALGRLRELCRRWLRPEVHTKEQMLTMLPKEIQAWLQEHRPESSEEAAALVEDLTQTLQDSDFEIQSENGENCNQDMFENESRKIFSEMPEGESAQHSDGESDFERDAGIQRLQGHSPGEDHGEVVSQDREVGQLIGLQGTYLGEKPYECPQCGKTFSRKSHLITHERTHTGEKYYKCDECGKSFSDGSNFSRHQTTHTGEKPYKCRDCGKSFSRSANLITHQRIHTGEKPFQCAECGKSFSRSPNLIAHQRTHTGEKPYSCPECGKSFGNRSSLNTHQGIHTGEKPYECKECGESFSYNSNLIRHQRIHTGEKPYKCTDCGQRFSQSSALITHRRTHTGEKPYQCSECGKSFSRSSNLATHRRTHMVEKPYKCGVCGKSFSQSSSLIAHQGMHTGEKPYECLTCGESFSWSSNLLKHQRIHTGEKPYKCSECGKCFSQRSQLVVHQRTHTGEKPYKCLMCGKSFSRGSILVMHQRAHLGDKPYRCPECGKGFSWNSVLIIHQRIHTGEKPYKCPECGKGFSNSSNFITHQRTHMKEKLY

SEQ ID NO: 16484 - protein, 1043 aa, Homo sapiens
MAMALELQAQASPQPEPEELLIVKLEEDSWGSESKLWEKDRGSVSGPEASRQRFRQFQYRDAAGPHEAFSQLWALCCRWLRPEIRLKEQILELLVLEQFLTILPREVQTWVQARHPESGEEAVALVEDWHRETRTAGQSGLELHTEETRPLKTGEEAQSFQLQPVDPWPEGQSQKKGVKNTCPDLPNHLNAEVAPQPLKESAVLTPRVPTLPKMGSVGDWEVTAESQEALGPGKHAEKELCKDPPGDDCGNSVCLGVPVSKPSNTSEKEQGPEFWGLSLINSGKRSTADYSLDNEPAQALTWRDSRAWEEQYQWDVEDMKVSGVHWGYEETKTFLAILSESPFSEKLRTCHQNRQVYRAIAEQLRARGFLRTLEQCRYRVKNLLRNYRKAKSSHPPGTCPFYEELEALVRARTAIRATDGPGEAVALPRLGYSDAEMDEQEEGGWDPEEMAEDCNGAGLVNVESTQGPRIAGAPALFQSRIAGVHWGYEETKAFLAILSESPFSEKLRTCHQNSQVYRAIAERLCALGFLRTLEQCRYRFKNLLRSYRKAKSSHPPGTCPFYEELDSLMRARAAVRAMGTVREAAGLPRCGQSSAETDAQEAWGEVANEDAVKPSTLCPKAPDMGFEMRHEDEDQISEQDIFEGLPGALSKCPTEAVCQPLDWGEDSENENEDEGQWGNPSQEQWQESSSEEDLEKLIDHQGLYLAEKPYKCDTCMKSFSRSSHFIAHQRIHTGEKPYKCLECGKNFSDRSNLNTHQRIHTGEKPYKCLECGKSFSDHSNLITHQRIHTGEKPYKCGECWKSFNQSSNLLKHQRIHLGGNPDQCSEPGGNFAQSPSFSAHWRNSTEETAPEQPQSISKDLNSPGPHSTNSGEKLYECSECGRSFSKSSALISHQRIHTGEKPYECAECGKSFSKSSTLANHQRTHTGEKPYKCVDCGKCFSERSKLITHQRVHTGEKPYKCLECGKFFRDRSNLITHQRIHTGEKPYKCRECGKCFNQSSSLIIHQRIHTGEKPYKCTECGKDFNNSSHFSAHRRTHAGGKAS

SEQ ID NO: 16485 - protein, 473 aa, Homo sapiens
MMTKVLGMAPVLGPRPPQEQVGPLMVKVEEKEEKGKYLPSLEMFRQRFRQFGYHDTPGPREALSQLRVLCCEWLRPEIHTKEQILELLVLEQFLTILPQELQAWVQEHCPESAEEAVTLLEDLERELDEPGHQVSTPPNEQKPVWEKISSSGTAKESPSSMQPQPLETSHKYESWGPLYIQESGEEQEFAQDPRKVRDCRLSTQHEESADEQKGSEAEGLKGDIISVIIANKPEASLERQCVNLENEKGTKPPLQEAGSKKGRESVPTKPTPGERRYICAECGKAFSNSSNLTKHRRTHTGEKPYVCTKCGKAFSHSSNLTLHYRTHLVDRPYDCKCGKAFGQSSDLLKHQRMHTEEAPYQCKDCGKAFSGKGSLIRHYRIHTGEKPYQCNECGKSFSQHAGLSSHQRLHTGEKPYKCKECGKAFNHSSNFNKHHRIHTGEKPYWCHHCGKTFCSKSNLSKHQRVHTGEGEAP

SEQ ID NO: 16486 - protein, 491 aa, Homo sapiens
MAIPKHSLSPVPWEEDSFLQVKVEEEEEASLSQGGESSHDHIAHSEAARLRFRHFRYEEASGPHEALAHLRALCCQWLQPEAHSKEQILELLVLEQFLGALPPEIQAWVGAQSPKSGEEAAVLVEDLTQVLDKRGWDPGAEPTEASCKQSDLGESEPSNVTETLMGGVSLGPAFVKACEPEGSSERSGLSGEIWTKSVTQQIHFKKTSGPYKDVPTDQRGRESGASRNSSSAWPNLTSQEKPPSEDKFDLVDAYGTEPPYTYSGKRSSKCRECRKMFQSASALEAHQKTHSRKTPYACSECGKAFSRSTHLAQHQVVHTGAKPHECKECGKAFSRVTHLTQHQRIHTGEKPYKCGECGKTFSRSTHLTQHQRVHTGERPYECDACGKAFSQSTHLTQHQRIHTGEKPYKCDACGRAFSDCSALIRHLRIHSGEKPYQCKVCPKAFAQSSSLIEHQRIHTGEKPYKCSDCGKAFSRSSALMVHLRIHITVLQ

SEQ ID NO: 16487 - protein, 389 aa, Homo sapiens
MAITLTLQTAEMQEGLLAVKVKEEEEEHSCGPESGLSRNNPHTREIFRRRFRQFCYQESPGPREALQRLQELCHQWLRPEMHTKEQILELLVLEQFLTILPEELQAWVRQHRPVSGEEAVTVLEDLERELDDPGEQVLSHAHEQEEFVKEKATPGAAQESSNDQFQTLEEQLGYNLREVCPVQEIDGKAGTWNVELAPKREISQEVKSLIQVLGKQNGNITQIPEYGDTCDREGRLEKQRVSSSVERPYICSECGKSFTQNSILIEHQRTHTGEKPYECDECGRAFSQRSGLFQHQRLHTGEKRYQCSVCGKAFSQNAGLFHHLRIHTGEKPYQCNQCNKSFSRRSVLIKHQRIHTGERPYECEECGKNFIYHCNLIQHRKVHPVAESS

SEQ ID NO: 16488 - protein, 544 aa, Homo sapiens
MLKEHPEMAEAPQQQLGIPVVKLEKELPWGRGREDPSPETFRLRFRQFRYQEAAGPQEALRELQELCRRWLRPELHTKEQILELLVLEQFLTILPREFYAWIREHGPESGKALAAMVEDLTERALEAKAVPCHRQGEQEETALCRGAWEPGIQLGPVEVKPEWGMPPGEGVQGPDPGTEEQLSQDPGDETRAFQEQALPVLQAGPGLPAVNPRDQEMAAGFFTAGSQGLGPFKDMALAFPEEEWRHVTPAQIDCFGEYVEPQDCRVSPGGGSKEKEAKPPQEDLKGALVALTSERFGEASLQGPGLGRVCEQEPGGPAGSAPGLPPPQHGAIPLPDEVKTHSSFWKPFQCPECGKGFSRSSNLVRHQRTHEEKSYGCVECGKGFTLREYLMKHQRTHLGKRPYVCSECWKTFSQRHHLEVHQRSHTGEKPYKCGDCWKSFSRRQHLQVHRRTHTGEKPYTCECGKSFSRNANLAVHRRAHTGEKPYGCQVCGKRFSKGERLVRHQRIHTGEKPYHCPACGRSFNQRSILNRHQKTQHRQEPLVQ

SEQ ID NO: 16489 - protein, 478 aa, Homo sapiens
MATALVSAHSLAPLNLKKEGLRVVREDHYSTWEQGFKLQGNSKGLGQEPLCKQFRQLRYEETTGPREALSRLRELCQQWLQPETHTKEQILELLVLEQFLIILPKELQARVQEHHPESREDVVVVLEDLQLDLGETGQQDPDQPKKQKILVEEMAPLKGVQEQQVRHECEVTKPEKEKGEETRIENGKLIVVTDSCGRVESSGKISEPMEAHNEGSNLERHQAKPKEKIEYKCSEREQRFIQHLDLIEHASTHTGKKLCESDVCQSSSLTGHKKVLSREKGHQCHECGKAFQRSSHLVRHQKIHLGEKPYQCNECGKVFSQNAGLLEHLRIHTGEKPYLCIHCGKNFRRSSHLNRHQRIHSQEEPCECKECGKTFSQALLLTHHQRIHSHSKSHQCNECGKAFSLTSDLIRHHRIHTGEKPFKCNICQKAFRLNSHLAQHVRIHNEEKPYQCSECGEAFRQRSGLFQHQRYHHKDKLA

SEQ ID NO: 16490 - protein, 852 aa, Homo sapiens; identical to SEQ ID NO: 14481

SEQ ID NO: 16491 - protein, 494 aa, Homo sapiens
MSGEATVLAYHAPEEQEGLLVVKVEEENYVLDQDFGLQENPWSQEVFRQKFRQFSYSDSTGPREALSRLRELCCQWLRPEVHSKEQILELLMLEQFLAILPEELQAWLREHRPENGEEAVTMLEELEKELEEPRQQDTTHGQEMFWQEMTSTGALKSLSLNSPVQPLENQCKTETQESQAFQERDGRMVAGKVLMAKQEIVECVASAAMISPGKLPGETHSQRIAEEALGGLDNSKKQKGNAAGNKISQLPSQDRHFSLATFNRRIPTEHSVLESHESEGSFSMNSNDITQQSVDTREKLYECFDCGKAFCQSSKLIRHQRIHTGERPYACKECGKAFSLSSDLVRHQRIHSGEKPYECCECGKAFRGSSELIRHRRIHTGEKPYECGECGKAFSRSSALIQHKKIHTGDKSYECIACGKAFGRSSILIEHQRIHTGEKPYECNECGKSFNQSSALTQHQRIHTGEKPYECSECRKTFRHRSGLMQHQRTHTRV

SEQ ID NO: 16492 - protein, 406 aa, Homo sapiens
MASTEEQYDLKIVKVEEDPIWDQETHLRGNNFSGQEASRQLFRQFCYQETPGPREALSRLRELCHQWLRPEIHTKEQILELLVLEQFLTILPEELQAWVREHHPESGEEAVAVVEDLEQELSEPGNQAPDHEHGHSEVLLEDVEHLKVKQEPTDIQLQPMVTQLRYESFCLHQFQEQDGESIPENQELASKQEILKEMEHLGDSKLQRDVSLDSKYRETCKRDSKAEKQQAHSTGERRHRCNECGKSFTKSSVLIEHQRIHTGEKPYECEECGKAFSRRSSLNEHRRSHTGEKPYQCKECGKAFSASNGLTRHRRIHTGEKPYECKVCGKAFLLSSCLVQHQRIHTGEKRYQCRECGKAFIQNAGLFQHLRVHTGEKPYQCSQCSKLFSKRTLLKKHQKIHTGERP

SEQ ID NO: 16493 - protein, 697 aa, Homo sapiens
MMAAVKSTEAHPSSNKDPTQGQKSALQGNSPDSEASRQRFRQFCYQEVTGPHEAFSKLWELCCQWLRPKTHSKEEILELLVLEQFLTILPEEIQTWVREQHPENGEEAVALVEDVQRAPGQQVLDSEKDLKVLMKEMAPLGATRESLRSQWKQEVQPEEPTFKGSQSSHQRPGEQSEAWLAPQAPRNLPQNTGLHDQETGAVVWTAGSQGPAMRDNRAVSLCQQEWMCPGPAQRALYRGATQRKDSHVSLATGVPWGYEETKTLLAILSSSQFYGKLQTCQQNSQIYRAMAEGLWEQGFLRTPEQCRTKFKSLQLSYRKVRRGRVPEPCIFYEEMNALSGSWASAPPMASDAVPGQEGSDIEAGELNHQNGEPTEVEDGTVDGADRDEKDFRNPGQEVRKLDLPVLFPNRLGFEFKNEIKKENLKWDDSEEVEINKALQRKSRGVYWHSELQKGLESEPTSRRQCRNSPGESEEKTPSQEKMSHQSFCARDKACTHILCGKNCSQSVHSPHKPALKLEKVSQCPECGKTFSRSSYLVRHQRIHTGEKPHKCSECGKGFSERSNLTAHLRTHTGERPYQCGQCGKSFNQSSSLIVHQRTHTGEKPYQCIVCGKRFNNSSQFSAHRRIHTGESPYKCAVCGKIFNNSSHFSAHRKTHTGEKPYRCSHCERGFTKNSALTRHQTVHMKAVLSSQEGRDAL

SEQ ID NO: 16494 - protein, 433 aa, Homo sapiens
MALDLRTIFQCEPSENNLGSENSAFQQSQGPAVQREEGISEFSRMVLNSFQDSNNSYARQELQRLYRIFHSWLQPEKHSKDEIISLLVLEQFMIGGHCNDKASVKEKWKSSGKNLERFIEDLTDDSINPPALVHVHMQGQEALFSEDMPLRDVIVHLTKQVNAQTTREANMGTPSQTSQDTSLETGQGYEDEQDGWNSSSKTTRVNENITNQGNQIVSLIIIQEENGPRPEEGGVSSDNPYNSKRAELVTARSQEGSINGITFQGVPMVMGAGCISQPEQSSPESALTHQSNEGNSTCEVHQKGSHGVQKSYKCEECPKVFKYLCHLLAHQRRHRNERPFVCPECQKGFFQISDLRVHQIIHTGKKPFTCSMCKKSFSHKTNLRSHERIHTGEKPYTCPFCKTSYRQSSTYHRHMRTHEKITLPSVPSTPEAS

SEQ ID NO: 16495 - protein, 496 aa, Homo sapiens
MAANCTSSWSLGESCNRPGLELPRSMASSETQLGNHDVDPEISHVNFRMFSCPKESDPIQALRKLTELCHLWLRPDLHTKEQILDMLVMEQFMISMPQELQVLVMMNGVQSCKDLEDLLRNNRRPKKWSVVTFHGKEYIVQDSDIEMAEAPSSVRDDLKDVSSQRASSVNQMRPGEGQAHRELQILPRVPALSRRQGEDFLLHKSIDVTGDPKSLRPKQTLEKDLKENREENPGLTSPEPQLPKSPTDLVRAKEGKDPPKIASVENVDADTPSACVVEREASTHSGNRGDALNLSSPKRSKPDASSISQEEPQGEATPVGNRESPGQAGMNSIHSPGPASPVSHPDGQEAKALPPFACDVCEKRFTCNSKLVIHKRSHTGERLFQCNLCGKRFMQLISLQFHQRTHTGERPYTCDVCQKQFTQKSYLKCHKRSHTGEKPFECKDCKKVFTYRGSLKEHQRIHSGEKPYKCSKCPRAFSRLKLLRRHQKTHPEATSQ

SEQ ID NO: 16496 - protein, 495 aa, Homo sapiens
MAANWTLSWGQGGPCNSPGSDTPRSVASPETQLGNHDRNPETWHMNFRMFSCPEESDPIQALRKLTELCHLWLRPDLHTKEQILDMLVMEQFMISMPQELQVLVKVNGVQSCKDLEDLLRNNRRPKKWSIVNLLGKEYLMLNSDVEMAEAPASVRDDPRDVSSQWASSVNQMHPGTGQARREQQILPRVAALSRRQGEDFLLHKSIDVTGDPNSPRPKQTLEKDLKENREENPGLSSPEPQLPKSPNLVRAKEGKEPQKRASVENVDADTPSACVVEREALTHSGNRGDALNLSSPKRSKPDASSISQEEPQGEATPVGNRESPGQAEINPVHSPGPAGPVSHPDGQEAKALPPFACDVCNKSFKYFSQLSIHRRSHTGDRPFQCDLCRKRFLQPSDLRVHQRVHTGERPYMCDVCQKRFAHESTLQGHKRIHTGERPFKCKYCSKVFSHKGNLNVHQRTHSGEKPYKCPTCQKAFRQLGTFKRHLKTHRETTSQ

SEQ ID NO: 16497 - protein, 496 aa, Homo sapiens
MAANCTSSWSLGESCNSPGSEPPQSMPSPATQLGNHDSDPETCHVNFRMFSCPKESDPIQALRKLTELCHLWLRPDLHTKEQILDMLVMEQFMISMPQELQVLVMMNGVQSCKDLEDLLRNNRRPKKWSVVSFLGKEYLMQESDVEMAEAPASVRDDPRHVSSQRTSSVNQMCPEEGQASQELQTLPRVPALFRRQEEDFLLPETTVMKGDPKALRPKPTLEKDLEEDREENPGLTSPEPQLPNSPTGVVGAKEGKEPQKRASVENVDADTPSACVVEREASTHSGSRGDALNLRGLKRSKPDATSISQEEPQGEATPVGNRESPGQAEINPVHSPGPAGPVSHPSGQEVKELLPFACEVCGKRFKYRGKLAVHTRSHTGERLFQCNLCGKRFMQRIGLQFHQRTHTGERPYTCDICQKQFTQKSYLKCHKRSHTGEKPFECKDCKKVFTYKANLKEHQRIHSGEKPHKCSKCPRAFGRPATLRRHQKTHREATSQ

SEQ ID NO: 16498 - protein, 394 aa, Homo sapiens
MNTNSKEVLSLGVQVPEAWEELLTMKVEAKSHLQWQESRLKRSNPLAREIFRRHFRQLCYQETPGPREALTRLQELCYQWLRPHVSTKEQILDLLVLEQFLSILPKELQGWVREHCPESGEEAVILLEDLERELDEPQHEMVAHRHRQEVLCKEMVPLAEQTPLTLQSQPKEPQLTCDSAQKCHSIGETDEVTKTEDRELVLRKDCPKIVEPHGKMFNEQTWEVSQQDPSHGEVGEHKDRIERQWGNLLGEGQHKCDECGKSFTQSSGLIRHQRIHTGERPYECNECGKAFSRSSGLFNHRGIHNIQKRYHCKECGKVFSQSAGLIQHQRIHKGEKPYQCSQCSKSYSRRSFLIEHQRSHTGERPHQCIECGKSFNRHCNLIRHQKIHTVAELV

SEQ ID NO: 16499 - protein, 578 aa, Homo sapiens
MLSCNICGETVTSEPDMKAHLIVHMESEIICPFCKLSGVNYDEMCFHIETAHFEQNTLERNFERINTVQYGTSDNKKDNTLQCGMEVNSSILSGCASNHPKNSAQNLTKDSTLKHEGFYSENLTESRKFLKSREKQSSLTEIKGSVYETTYSPPECPFCGKIEEHSEDMETHVKTKHANLLDIPLEDCDQPLYDCPMCGLICTNYHILQEHVDLHLEENSFQQGMDRVQCSGDLQLAHQLQQEEDRKRRSEESRQEIEEFQKLQRQYGLDNSGGYKQQQLRNMEIEVNRGRMPPSEFHRRKADMMESLALGFDDGKTKTSGIIEALHRYYQNAATDVRRVWLSSVVDHFHSSLGDKGWGCGYRNFQMLLSSLLQNDAYNDCLKGMLIPCIPKIQSMIEDAWKEGFDPQGASQLNNRLQGTKAWIGACEVYILLTSLRVKCHIVDFHKSTGPLGTHPRLFEWILNYYSSEGEGSPKVVCTSKPPIYLQHQGHSRTVIGIEEKKNRTLCLLILDPGCPSREMQKLLKQDIEASSLKQLRKSMGNLKHKQYQILAVEGALSLEEKLARRQASQVFTAEKIP

SEQ ID NO: 16500 - protein, 799 aa, Homo sapiens
MEIPKLLPARGTLQGGGGGGIPAGGGRVHRGPDSPAGQVPTRRLLLPRGPQDGGPGRRREEASTASRGPGPSLFAPRPHQPSGGGDDFFLVLLDPVGGDVETAGSGQAAGPVLREEAKAGPGLQGDESGANPAGCSAQGPHCLSAVPTPAPISAPGPAAAFAGTVTIHNQDLLLRFENGVLTLATPPPHAWEPGAAPAQQPRCLIAPQAGFPQAAHPGDCPELRSDLLLAEPAEPAPAPAPQEEAEGLAAALGPRGLLGSGPGVVLYLCPEALCGQTFAKKHQLKMHLLTHSSSQGQRPFKCPLGGCGWTFTTSYKLKRHLQSHDKLRPFGCPAEGCGKSFTTVYNLKAHMKGHEQENSFKCEVCEESFPTQAKLGAHQRSHFEPERPYQCAFSGCKKTFITVSALFSHNRAHFREQELFSCSFPGCSKQYDKACRLKIHLRSHTGERPFLCDFDGCGWNFTSMSKLLRHKRKHDDDRRFMCPVEGCGKSFTRAEHLKGHSITHLGTKPFVCPVAGCCARFSARSSLYIHSKKHLQDVDTWKSRCPISSCNKLFTSKHSMKTHMVKRHKVGQDLLAQLEAANSLTPSSELTSQRQNDLSDAEIVSLFSDVPDSTSAALLDTALVNSGILTIDVASVSSTLAGHLPANNNNSVGQAVDPPSLMATSDPPQSLDTSLFFGTAATGFQQSSLNMDEVSSVSVGPLGSLDSLAMKNSSPEPQALTPSSKLTVDTDTLTPSSTLCENSVSELLTPAKAEWSVHPNSDFFGQEGETQFGFPNAAGNHGSQKERNLITVTGSSFLV

SEQ ID NO: 16501 - protein, 803 aa, Homo sapiens
MEIPKLLPARGTLQGGGGGGIPAGGGRVHRGPDSPAGQVPTRRLLLLRGPQDGGPGRRREEASTASRGPGPSLLAPRTDQPSGGGGGGGDDFFLVLLDPVGGDVETAGSGQAAGPVLREEAEEGPGLQGGESGANPAGPTALGPRCLSAVPTPAPISAPGPAAAFAGTVTIHNQDLLLRFENGVLTLATPPPHAWEPGAAPAQQPGCLIAPQAGFPHAAHPGDCPELPPDLLLAEPAEPAPAPAPEEEAEGPAAALGPRGPLGSGPGVVLYLCPEAQCGQTFAKKHQLKVHLLTHSSSQGQRPFKCPLGGCGWTFTTSYKLKRHLQSHDKLRPFGCPAEGCGKSFTTVYNLKAHMKGHEQENSFKCEVCEESFPTQAKLSAHQRSHFEPERPYQCAFSGCKKTFITVSALFSHNRAHFREQELFSCSFPGCSKQYDKACRLKIHLRSHTGERPFLCDFDGCGWNFTSMSKLLRHKRKHDDDRRFMCPVEGCGKSFTRAEHLKGHSITHLGTKPFVCPVAGCCARFSARSSLYIHSKKHLQDVDTWKSRCPISSCNKLFTSKHSMKTHMVKRHKVGQDLLAQLEAANSLTPSSELTSQRQNDLSDAEIVSLFSDVPDSTSAALLDTALVNSGILTIDVASVSSTLAGHLPANNNNSVGQAVDPPSLMATSDPPQSLDTSLFFGTAATGFQQSSLNMDEVSSVSVGPLGSLDSLAMKNSSPEPQALTPSSKLTVDTDALTPSSTLCENSVSELLTPTKAEWNVHPDSDFFGQEGETQFGFPNAAGNHGSQKETDLITVTGSSFLV

SEQ ID NO: 16502 - protein, 858 aa, Homo sapiens
MDLPALLPAPTARGGQHGGGPGPLRRAPAPLGASPARRRLLLVRGPEDGGPGARPGEASGPSPPPAEDDSDGDSFLVLLEVPHGGAAAEAAGSQEAEPGSRVNLASRPEQGPSGPAAPPGPGVAPAGAVTISSQDLLVRLDRGVLALSAPPGPATAGAAAPRRAPQASGPSTPGYRCPEPQCALAFAKKHQLKVHLLTHGGGQGRRPFKCPLEGCGWAFTTSYKLKRHLQSHDKLRPFGCPVGGCGKKFTTVYNLKAHMKGHEQESLFKCEVCAERFPTHAKLSSHQRSHFEPERPYKCDFPGCEKTFITVSALFSHNRAHFREQELFSCSFPGCSKQYDKACRLKIHLRSHTGERPFICDSDSCGWTFTSMSKLLRHRRKHDDDRRFTCPVEGCGKSFTRAEHLKGHSITHLGTKPFECPVEGCCARFSARSSLYIHSKKHVQDVGAPKSRCPVSTCNRLFTSKHSMKAHMVRQHSRRQDLLPQLEAPSSLTPSSELSSPGQSELTNMDLAALFSDTPANASGSAGGSDEALNSGILTIDVTSVSSSLGGNLPANNSSLGPMEPLVLVAHSDIPPSLDSPLVLGTAATVLQQGSFSVDDVQTVSAGALGCLVALPMKNLSDDPLALTSNSNLAAHITTPTSSSTPRENASVPELLAPIKVEPDSPSRPGAVGQQEGSHGLPQSTLPSPAEQHGAQDTELSAGTGNFYLESGGSARTDYRAIQLAKEKKQRGAGSNAGASQSTQRKIKEGKMSPPHFHASQNSWLCGSLVVPSGGRPGPAPAAGVQCGAQGVQVQLVQDDPSGEGVLPSARGPATFLPFLTVDLPVYVLQEVLPSSGGPAGPEATQFPGSTINLQDLQ

SEQ ID NO: 16503 - protein, 903 aa, Homo sapiens
MAASRSTRVTRSTVGLNGLDESFCGRTLRNRSIAHPEEISSNSQVRSRSPKKRPEPVPIQKGNNNGRTTDLKQQSTRESWVSPRKRGLSSSEKDNIERQAIENCERRQTEPVSPVLKRIKRCLRSEAPNSSEEDSPIKSDKESVEQRSTVVDNDADFQGTKRACRCLILDDCEKREIKKVNVSEEGPLNSAVVEEITGYLAVNGVDDSDSAVINCDDCQPDGNTKQNSIGSYVLQEKSVAENGDTDTQTSMFLDSRKEDSYIDHKVPCTDSQVQVKLEDHKIVTACLPVEHVNQLTTEPATGPFSETQSSLRDSEEEVDVVGDSSASKEQCKENTNNELDTSLESMPASGEPEPSPVLDCVSAQMMSLSEPQEHRYTLRTSPRRAAPTRGSPTKNSSPYRENGQFEENNLSPNETNATVSDNVSQSPTNPGEISQNEKGICCDSQNNGSEGVSKPPSEARLNIGHLPSAKESASQHITEEEDDDPDVYYFESDHVALKHNKDYQRLLQTIAVLEAQRSQAVQDLESLGRHQREALKNPIGFVEKLQKKADIGLPYPQRVVQLPEIVWDQYTHSLGNFEREFKNRKRHTRRVKLVFDKVGLPARPKSPLDPKKDGESLSYSMLPLSDGPEGSSSRPQMIRGRLCDDTKPETFNQLWTVEEQKKLEQLLIKYPPEEVESRRWQKIADELGNRTAKQVASRVQKYFIKLTKAGIPVPGRTPNLYIYSKKSSTSRRQHPLNKHLFKPSTFMTSHEPPVYMDEDDDRSCFHSHMNTAVEDASDDESIPIMYRNLPEYKELLQFKKLKKQKLQQMQAESGFVQHVGFKCDNCGIEPIQGVRWHCQDCPPEMSLDFCDSCSDCLHETDIHKEDHQLEPIYRSETFLDRDYCVSQGTSYNYLDPNYFPANR

SEQ ID NO: 16504 - protein, 455 aa, Homo sapiens; identical to SEQ ID NO: 13598

SEQ ID NO: 16505 - protein, 461 aa, Homo sapiens; identical to SEQ ID NO: 13600

SEQ ID NO: 16506 - protein, 417 aa, Homo sapiens; identical to SEQ ID NO: 13608

SEQ ID NO: 16507 - protein, 655 aa, Homo sapiens
MGTSPSSSTALASCSRIARRATATMIAGSLLLLGFLSTTTAQPEQKASNLIGTYRHVDRATGQVLTCDKCPAGTYVSEHCTNTSLRVCSSCPVGTFTRHENGIEKCHDCSQPCPWPMIEKLPCAALTDRECTCPPGMFQSNATCAPHTVCPVGWGVRKKGTETEDVRCKQCARGTFSDVPSSVMKCKAYTDCLSQNLVVIKPGTKETDNVCGTLPSFSSSTSPSPGTAIFPRPEHMETHEVPSSTYVPKGMNSTESNSSASVRPKVLSSIQEGTVPDNTSSARGKEDVNKTLPNLQVVNHQQGPHHRHILKLLPSMEATGGEKSSTPIKGPKRGHPRQNLHKHFDINEHLPWMIVLFLLLVLVVIVVCSIRKSSRTLKKGPRQDPSAIVEKAGLKKSMTPTQNREKWIYYCNGHGIDILKLVAAQVGSQWKDIYQFLCNASEREVAAFSNGYTADHERAYAALQHWTIRGPEASLAQLISALRQHRRNDVVEKIRGLMEDTTQLETDKLALPMSPSPLSPSPIPSPNAKLENSALLTVEPSPQDKNKGFFVDESEPLLRCDSTSSGSSALSRNGSFITKEKKDTVLRQVRLDPCDLQPIFDDMLHFLNPEELRVIEEIPQAEDKLDRLFEIIGVKSQEASQTLLDSVYSHLPDLL

SEQ ID NO: 16508 - protein, 335 aa, Homo sapiens; identical to SEQ ID NO: 5111

SEQ ID NO: 16509 - protein, 2511 aa, Homo sapiens
MEEVVIAGMSGKLPESENLQEFWDNLIGGVDMVTDDDRRWKAGLYGLPRRSGKLKDLSRFDASFFGVHPKQAHTMDPQLRLLLEVTYEAIVDGGINPDSLRGTHTGVWVGVSGSETSEALSRDPETLVGYSMVGCQRAMMANRLSFFFDFRGPSIALDTACSSSLMALQNAYQAIHSGQCPAAIVGGINVLLKPNTSVQFLRLGMLSPEGTCKAFDTAGNGYCRSEGVVAVLLTKKSLARRVYATILNAGTNTDGFKEQGVTFPSGDIQEQLIRSLYQSAGVAPESFEYIEAHGTGTKVGDPQELNGITRALCATRQEPLLIGSTKSNMGHPEPASGLAALAKVLLSLEHGLWAPNLHFHSPNPEIPALLDGRLQVVDQPLPVRGGNVGINSFGFGGSNVHIILRPNTQPPPAPAPHATLPRLLRASGRTPEAVQKLLEQGLRHSQDLAFLSMLNDIAAVPATAMPFRGYAVLGGERGGPEVQQVPAGERPLWFICSGMGTQWRGMGLSLMRLDRFRDSILRSDEAVKPFGLKVSQLLLSTDESTFDDIVHSFVSLTAIQIGLIDLLSCMGLRPDGIVGHSLGEVACGYADGCLSQEEAVLAAYWRGQCIKEAHLPPGAMAAVGLSWEECKQRCPPGVVPACHNSKDTVTISGPQAPVFEFVEQLRKEGVFAKEVRTGGMAFHSYFMEAIAPPLLQELKKVIREPKPRSARWLSTSIPEAQWHSSLARTSSAEYNVNNLVSPVLFQEALWHVPEHAVVLEIAPHALLQAVLKRGLKPSCTIIPLMKKDHRDNLEFFLAGIGRLHLSGIDANPNALFPPVEFPAPRGTPLISPLIKWDHSLAWDVPAAEDFPNGSGSPSAAIYNIDTSSESPDHYLVDHTLDGRVLFPATGYLSIVWKTLARALGLGVEQLPVVFEDVVLHQATILPKTGTVSLEVRLLEASRAFEVSENGNLVVSGKVYQWDDPDPRLFDHPESPTPNPTEPLFLAQAEVYKELRLRGYDYGPHFQGILEASLEGDSGRLLWKDNWVSFMDTMLQMSILGSAKHGLYLPTRVTAIHIDPATHRQKLYTLQDKAQVADVVVSRWLRVTVAGGVHISGLHTESAPRRQQEQQVPILEKFCFTPHTEEGCLSERAALQEELQLCKGLVQALQTKVTQQGLKMVVPGLDGAQIPRDPSQQELPRLLSAACRLQLNGNLQLELAQVLAQERPKLPEDPLLSGLLDSPALKACLDTAVENMPSLKMKVVEVLAGHGHLYSRIPGLLSPHPLLQLSYTATDRHPQALEAAQAELQQHDVAQGQWDPADPAPSALGSADLLVCNCAVAALGDPASALSNMVAALREGGFLLLHTLLRGHPLGDIVAFLTSTEPQYGQGILSQDAWESLFSRVSLRLVGLKKSFYGSTLFLCRRPTPQDSPIFLPVDDTSFRWVESLKGILADEDSSRPVWLKAINCATSGVVGLVNCLRREPGGNRLRCVLLSNLSSTSHVPEVDPGSAELQKVLQGDLVMNVYRDGAWGAFRHFLLEEDKPEEPTAHAFVSTLTRGDLSSIRWVCSSLRHAQPTCPGAQLCTVYYASLNFRDIMLATGKLSPDAIPGKWTSQDSLLGMEFSGRDASGKRVMGLVPAKGLATSVLLSPDFLWDVPSNWTLEEAASVPVVYSTAYYALVVRGRVRPGETLLIHSGSGGVGQAAIAIALSLGCRVFTTVGSAEKRAYLQARFPQLDSTSFANSRDTSFEQHVLWHTGGKGVDLVLNSLAEEKLQASVRCLATHGRFLEIGKFDLSQNHPLGMAIFLKNVTFHGVLLDAFFNESSADWREVWALVQAGIRDGVVRPLKCTVFHGAQVEDAFRYMAQGKHIGKVVVQVLAEEPEAVLKGAKPKLMSAISKTFCPAHKSYIIAGGLGGFGLELAQWLIQRGVQKLVLTSRSGIRTGYQAKQVRRWRRQGVQVQVSTSNISSLEGARGLIAEAAQLGPVGGVFNLAVVLRDGLLENQTPEFFQDVCKPKYSGTLNLDRVTREACPELDYFVVFSSVSCGRGNAGQSNYGFANSAMERICEKRRHEGLPGLAVQWGAIGDVGILVETMSTNDTIVSGTLPQRMASCLEVLDLFLNQPHMVLSSFVLAEKAAAYRDRDSQRDLVEAVAHILGIRDLAAVNLDSSLADLGLDSLMSVEVRQTLERELNLVLSVREVRQLTLRKLQELSSKADEASELACPTPKEDGLAQQQTQLNLRSLLVNPEGPTLMRLNSVQSSERPLFLVHPIEGSTTVFHSLASRLSIPTYGLQCTRAAPLDSIHSLAAYYIDCIRQVQPEGPYRVAGYSYGACVAFEMCSQLQAQQSPAPTHNSLFLFDGSPTYVLAYTQSYRAKLTPGCEAEAETEAICFFVQQFTDMEHNRVLEALLPLKGLEERVAAAVDLIIKSHQGLDRQELSFAARSFYYKLRAAEQYTPKAKYHGNVMLLRAKTGGAYGEDLGADYNLSQVCDGKVSVHVIEGDHRTLLEGSGLESIISIIHSSLAEPRVSVREG

SEQ ID NO: 16510 - protein, 281 aa, Homo sapiens
MQQPFNYPYPQIYWVDSSASSPWAPPGTVLPCPTSVPRRPGQRRPPPPPPPPPLPPPPPPPPLPPLPLPPLKKRGNHSTGLCLLVMFFMVLVALVGLGLGMFQLFHLQKELAELRESTSQMHTASSLEKQIGHPSPPPEKKELRKVAHLTGKSNSRSMPLEWEDTYGIVLLSGVKYKKGGLVINETGLYFVYSKVYFRGQSCNNLPLSHKVYMRNSKYPQDLVMMEGKMMSYCTTGQMWARSSYLGAVFNLTSADHLYVNVSELSLVNFEESQTFFGLYKL

SEQ ID NO: 16511 - protein, 393 aa, Homo sapiens [sequence omitted]

SEQ ID NO: 16512 - protein, 455 aa, Homo sapiens; identical to SEQ ID NO: 13598

SEQ ID NO: 16513 - protein, 461 aa, Homo sapiens; identical to SEQ ID NO: 13600

SEQ ID NO: 16514 - protein, 468 aa, Homo sapiens
MAPPPARVHLGAFLAVTPNPGSAASGTEAAAATPSKVWGSSAGRIEPRGGGRGALPTSMGQHGPSARARAGRAPGPRPAREASPRLRVHKTFKFVVVGVLLQVVPSSAATIKLHDQSIGTQQWEHSPLGELCPPGSHRSEHPGACNRCTEGVGYTNASNNLFACLPCTACKSDEEERSPCTTTRNTACQCKPGTFRNDNSAEMCRKCSRGCPRGMVKVKDCTPWSDIECVHKESGNGHNIWVILVVTLVVPLLLVAVLIVCCCIGSGCGGDPKCMDRVCFWRLGLLRGPGAEDNAHNEILSNADSLSTFVSEQQMESQEPADLTGVTVQSPGEAQCLLGPAEAEGSQRRRLLVPANGADPTETLMLFFDKFANIVPFDSWDQLMRQLDLTKNEIDVVRAGTAGPGDALYAMLMKWVNKTGRNASIHTLLDALERMEERHAREKIQDLLVDSGKFIYLEDGTGSAVSLE

SEQ ID NO: 16515 - protein, 440 aa, Homo sapiens
MEQRGQNAPAASGARKRHGPGPREARGARPGPRVPKTLVLVVAAVLLLVSAESALITQQDLAPQQRAAPQQKRSSPSEGLCPPGHHISEDGRDCISCKYGQDYSTHWNDLLFCLRCTRCDSGEVELSPCTTTRNTVCQCEEGTFREEDSPEMCRKCRTGCPRGMVKVGDCTPWSDIECVHKESGTKHSGEVPAVEETVTSSPGTPASPCSLSGIIIGVTVAAVVLIVAVFVCKSLLWKKVLPYLKGICSGGGGDPERVDRSSQRPGAEDNVLNEIVSILQPTQVPEQEMEVQEPAEPTGVNMLSPGESEHLLEPAEAERSQRRRLLVPANEGDPTETLRQCFDDFADLVPFDSWEPLMRKLGLMDNEIKVAKAEAAGHRDTLYTMLIKWVNKTGRDASVHTLLDALETLGERLAKQKIEDHLLSSGKFMYLEGNADSAMS

SEQ ID NO: 16516 - protein, 208 aa, Homo sapiens
MDPFLVLLHSVSSSLSSSELTELKFLCLGRVGKRKLERVQSGLDLFSMLLEQNDLEPGHTELLRELLASLRRHDLLRRVDDFEAGAAAGAAPGEEDLCAAFNVICDNVGKDWRRLARQLKVSDTKIDSIEDRYPRNLTERVRESLRIWKNTEKENATVAHLVGALRSCQMNLVADLVQEVQQARDLQNRSGAMSPMSWNSDASTSEAS

SEQ ID NO: 16517 - protein, 312 aa, Homo sapiens
MAAGQNGHEEWVGSAYLFVESSLDKVVLSDAYAHPQQKVAVYRALQAALAESGGSPDVLQMLKIHRSDPQLIVQLRFCGRQPCGRFLRAYREGALRAALQRSLAAALAQHSVPLQLELRAGAERLDALLADEERCLSCILAQQPDRLRDEELAELEDALRNLKCGSGARGGDGEVASAPLQPPVPSLSEVKPPPPPPPAQTFLFQGQPVVNRPLSLKDQQTFARSVGLKWRKVGRSLQRGCRALRDPALDSLAYEYEREGLYEQAFQLLRRFVQAEGRRATLQRLVEALEENELTSLAEDLLGLTDPNGGLA

SEQ ID NO: 16518 - protein, 192 aa, Homo sapiens
MDGSGEQPRGGGPTSSEQIMKTGALLLQGFIQDRAGRMGGEAPELALDPVPQDASTKKLSECLKRIGDELDSNMELQRMIAAVDTDSPREVFFRVAADMFSDGNFNWGRVVALFYFASKLVLKALCTKVPELIRTIMGWTLDFLRERLLGWIQDQGGWDGLLSYFGTPTWQTVTIFVAGVLTASLTIWKKMG

SEQ ID NO: 16519 - protein, 211 aa, Homo sapiens
MASGQGPGPPRQECGEPALPSASEEQVAQDTEEVFRSYVFYRHQQEQEAEGVAAPADPEMVTLPLQPSSTMGQVGRQLAIIGDDINRRYDSEFQTMLQHLQPTAENAYEYFTKIATSLFESGINWGRVVALLGFGYRLALHVYQHGLTGFLGQVTRFVVDFMLHHCIARWIAQRGGWVAALNLGNGPILNVLVVLGVVLLGQFVVRRFFKS

SEQ ID NO: 16520 - protein, 246 aa, Homo sapiens
MTMDKSELVQKAKLAEQAERYDDMAAAMKAVTEQGHELSNEERNLLSVAYKNVVGARRSSWRVISSIEQKTERNEKKQQMGKEYREKIEAELQDICNDVLELLDKYLIPNATQPESKVFYLKMKGDYFRYLSEVASGDNKQTTVSNSQQAYQEAFEISKKEMQPTHPIRLGLALNFSVFYYEILNSPEKACSLAKTAFDEAIAELDTLNEESYKDSTLIMQLLRDNLTLWTSENQGDEGDAGEGEN

SEQ ID NO: 16521 - protein, 239 aa, Homo sapiens
MAHAGRTGYDNREIVMKYIHYKLSQRGYEWDAGDVGAAPPGAAPAPGIFSSQPGHTPHPAASRDPVARTSPLQTPAAPGAAAGPALSPVPPVVHLTLRQAGDDFSRRYRRDFAEMSSQLHLTPFTARGRFATVVEELFRDGVNWGRIVAFFEFGGVMCVESVNREMSPLVDNIALWMTEYLNRHLHTWIQDNGGWDAFVELYGPSMRPLFDFSWLSLKTLLSLALVGACITLGAYLGHK

SEQ ID NO: 16522 - protein, 105 aa, Homo sapiens
MGDVEKGKKIFIMKCSQCHTVEKGGKHKTGPNLHGLFGRKTGQAPGYSYTAANKNKGIIWGEDTLMEYLENPKKYIPGTKMIFVGIKKKEERADLIAYLKKATNE

SEQ ID NO: 16523 - protein, 239 aa, Homo sapiens
MAALKSWLSRSVTSFFRYRQCLCVPVVANFKKRCFSELIRPWHKTVTIGFGVTLCAVPIAQKSEPHSLSSEALMRRAVSLVTDSTSTFLSQTTYALIEAITEYTKAVYTLTSLYRQYTSLLGKMNSEEEDEVWQVIIGARAEMTSKHQEYLKLETTWMTAVGLSEMAAEAAYQTGADQASITARNHIQLVKLQVEEVHQLSRKAETKLAEAQIEELRQKTQEEGEERAESEQEAYLRED

SEQ ID NO: 16524 - protein, 422 aa, Homo sapiens
MALRGSHRLEVIFKRCIASPVLHSHAANRRSSQLAIKEGDPNSNGNSGQYQQNGEQKEKGWRRLVRFFVPFSLGAVVSAAIIQREDLTPTIAASKMTGRRRDFNFIADVVAGCADSVVYIEIKDTRHFDYFSGQPITASNGSGFIIEQNGLILTNAHVVINKPHTMVQVRLSDGRTFPATIEDVDQTSDLATLRIQVNNLSVMRLGKSSTLRSGEWVVALGSPLALSNTVTAGVISSTQRASQELGLRNRDINYLQTDAAITFGNSGGPLVNLDGEAIGVNSMKVTAGISFAIPIDYVKVFLERAAEKRKKGSAYKTGYPVKRYMGITMLTLTPDILFELKSRSQNMPSNLTHGVLVWKVIVGSPAHSGGLQPGDIVTHINKKEIKNSSDVYDALADNSKTLDIVILRGVKQMHVTITPEDP

SEQ ID NO: 16525 - protein, 613 aa, Homo sapiens
MFRCGGLAAGALKQKLVPLVRTVCVRSPRQRNRLPGNLFQRWHVPLELQMTRQMASSGASGGKIDNSVLVLIVGLSTVGAGAYAYKTMKEDEKRYNERISGLGLTPEQKQKKAALSASEGEEVPQDKAPSHVPFLLIGGGTAAFAAARSIRARDPGARVLIVSEDPELPYMRPPLSKELWFSDDPNVTKTLRFKQWNGKERSIYFQPPSFYVSAQDLPHIENGGVAVLTGKKVVQLDVRDNMVKLNDGSQITYEKCLIATGGTPRSLSAIDRAGAEVKSRTTLFRKIGDFRSLEKISREVKSITIIGGGFLGSELACALGRKARALGTEVIQLFPEKGNMGKILPEYLSNWTMEKVRREGVKVMPNAIVQSVGVSSGKLLIKLKDGRKVETDHIVAAVGLEPNVELAKTGGLEIDSDFGGFRVNAELQARSNIWVAGDAACFYDIKLGRRRVEHHDHAVVSGRLAGENMTGAAKPYWHQSMFWSDLGPDVGYEAIGLVDSSLPTVGVFAKATAQDNPKSATEQSGTGIRSESETESEASEITIPPSTPAVPQAPVQGEDYGKGVIFYLRDKVVVGIVLWNIFNRMPIARKIIKDGEQHEDLNEVAKLFNIHED

SEQ ID NO: 16526 - protein, 368 aa, Homo sapiens; identical to SEQ ID NO: 4942

SEQ ID NO: 16527 - protein, 416 aa, Homo sapiens
MDEADRRLLRRCRLRLVEELQVDQLWDALLSRELFRPHMIEDIQRAGSGSRRDQARQLIIDLETRGSQALPLFISCLEDTGQDMLASFLRTNRQAAKLSKPTLENLTPVVLRPEIRKPEVLRPETPRPVDIGSGGFGDVGALESLRGNADLAYILSMEPCGHCLIINNVNFCRESGLRTRTGSNIDCEKLRRRFSSLHFMVEVKGDLTAKKMVLALLELAQQDHGALDCCVVVILSHGCQASHLQFPGAVYGTDGCPVSVEKIVNIFNGTSCPSLGGKPKLFFIQACGGEQKDHGFEVASTSPEDESPGSNPEPDATPFQEGLRTFDQLDAISSLPTPSDIFVSYSTFPGFVSWRDPKSGSWYVETLDDIFEQWAHSEDLQSLLLRVANAVSVKGIYKQMPGCFNFLRKKLFFKTS

SEQ ID NO: 16528 - protein, 452 aa, Homo sapiens
MAAPSAGSWSTFQHKELMAADRGRRILGVCGMHPHHQETLKKNRVVLAKQLLLSELLEHLLEKDIITLEMRELIQAKVGSFSQNVELLNLLPKRGPQAFDAFCEALRETKQGHLEDMLLTTLSGLQHVLPPLSCDYDLSLPFPVCESCPLYKKLRLSTDTVEHSLDNKDGPVCLQVKPCTPEFYQTHFQLAYRLQSRPRGLALVLSNVHFTGEKELEFRSGGDVDHSTLVTLFKLLGYDVHVLCDQTAQEMQEKLQNFAQLPAHRVTDSCIVALLSHGVEGAIYGVDGKLLQLQEVFQLFDNANCPSLQNKPKMFFIQACRGDETDRGVDQQDGKNHAGSPGCEESDAGKEKLPKMRLPTRSDMICGYACLKGTAAMRNTKRGSWYIEALAQVFSERACDMHVADMLVKVNALIKDREGYAPGTEFHRCKEMSEYCSTLCRHLYLFPGHPPT

SEQ ID NO: 16529 - protein, 479 aa, Homo sapiens
MDFSRNLYDIGEQLDSEDLASLKFLSLDYIPQRKQEPIKDALMLFQRLQEKRMLEESNLSFLKELLFRINRLDLLITYLNTRKEEMERELQTPGRAQISAYRVMLYQISEEVSRSELRSFKFLLQEEISKCKLDDDMNLLDIFIEMEKRVILGEGKLDILKRVCAQINKSLLKIINDYEEFSKERSSSLEGSPDEFSNGEELCGVMTISDSPREQDSESQTLDKVYQMKSKPRGYCLIINNHNFAKAREKVPKLHSIRDRNGTHLDAGALTTTFEELHFEIKPHDDCTVEQIYEILKIYQLMDHSNMDCFICCILSHGDKGIIYGTDGQEAPIYELTSQFTGLKCPSLAGKPKVFFIQACQGDNYQKGIPVETDSEEQPYLEMDLSSPQTRYIPDEADFLLGMATVNNCVSYRNPAEGTWYIQSLCQSLRERCPRGDDILTILTEVNYEVSNKDDKKNMGKQMPQPTFTLRKKLVFPSD

SEQ ID NO: 16530 - protein, 521 aa, Homo sapiens
MKSQGQHWYSSSDKNCKVSFREKLLIIDSNLGVQDVENLKFLCIGLVPNKKLEKSSSASDVFEHLLAEDLLSEEDPFFLAELLYIIRQKKLLQHLNCTKEEVERLLPTRQRVSLFRNLLYELSEGIDSENLKDMIFLLKDSLPKTEMTSLSFLAFLEKQGKIDEDNLTCLEDLCKTVVPKLLRNIEKYKREKAIQIVTPPVDKEAESYQGEEELVSQTDVKTFLEALPQESWQNKHAGSNGNRATNGAPSLVSRGMQGASANTLNSETSTKRAAVYRMNRNHRGLCVIVNNHSFTSLKDRQGTHKDAEILSHVFQWLGFTVHIHNNVTKVEMEMVLQKQKCNPAHADGDCFVFCILTHGRFGAVYSSDEALIPIREIMSHFTALQCPRLAEKPKLFFIQACQGEEIQPSVSIEADALNPEQAPTSLQDSIPAEADFLLGLATVPGYVSFRHVEEGSWYIQSLCNHLKKLVPRMLKFLEKTMEIRGRKRTVWGAKQISATSLPTAISAQTPRPPMRRWSSVS

SEQ ID NO: 16531 - protein, 277 aa, Homo sapiens
MENTENSVDSKSIKNLEPKIIHGSESMDSGISLDNSYKMDYPEMGLCIIINNKNFHKSTGMTSRSGTDVDAANLRETFRNLKYEVRNKNDLTREEIVELMRDVSKEDHSKRSSFVCVLLSHGEEGIIFGTNGPVDLKKITNFFRGDRCRSLTGKPKLFIIQACRGTELDCGIETDSGVDDDMACHKIPVEADFLYAYSTAPGYYSWRNSKDGSWFIQSLCAMLKQYADKLEFMHILTRVNRKVATEFESFSFDATFHAKKQIPCIVSMLTKELYFYH

SEQ ID NO: 16532 - protein, 293 aa, Homo sapiens
MSSASGLRRGHPAGGEENMTETDAFYKREMFDPAEKYKMDHRRRGIALIFNHERFFWHLTLPERRGTCADRDNLTRRFSDLGFEVKCFNDLKAEELLLKIHEVSTVSHADADCFVCVFLSHGEGNHIYAYDAKIEIQTLTGLFKGDKCHSLVGKPKIFIIQACRGNQHDVPVIPLDVVDNQTEKLDTNITEVDAASVYTLPAGADFLMCYSVAEGYYSHRETVNGSWYIQDLCEMLGKYGSSLEFTELLTLVNRKVSQRRVDFCKDPSAIGKKQVPCFASMLTKKLHFFPKSN

SEQ ID NO: 16533 - protein, 303 aa, Homo sapiens
MADDQGCIEEQGVEDSANEDSVDAKPDRSSFVPSLFSKKKKNVTMRSIKTTRDRVPTYQYNMNFEKLGKCIIINNKNFDKVTGMGVRNGTDKDAEALFKCFRSLGFDVIVYNDCSCAKMQDLLKKASEEDHTNAACFACILLSHGEENVIYGKDGVTPIKDLTAHFRGDRCKTLLEKPKLFFIQACRGTELDDGIQADSGPINDTDANPRYKIPVEADFLFAYSTVPGYYSWRSPGRGSWFVQALCSILEEHGKDLEIMQILTRVNDRVARHFESQSDDPHFHEKKQIPCVVSMLTKELYFSQ

SEQ ID NO: 16534 - protein, 233 aa, Homo sapiens
MSTESMIRDVELAEEALPKKTGGPQGSRRCLFLSLFSFLIVAGATTLFCLLHFGVIGPQREEFPRDLSLISPLAQAVRSSSRTPSDKPVAHVVANPQAEGQLQWLNRRANALLANGVELRDNQLVVPSEGLYLIYSQVLFKGQGCPSTHVLLTHTISRIAVSYQTKVNLLSAIKSPCQRETPEGAEAKPWYEPIYLGGVFQLEKGDRLSAEINRPDYLDFAESGQVYFGIIAL

SEQ ID NO: 16535 - protein, 249 aa, Homo sapiens; identical to SEQ ID NO: 13620

SEQ ID NO: 16536 - protein, 129 aa, Homo sapiens; identical to SEQ ID NO: 13576

SEQ ID NO: 16537 - protein, 281 aa, Homo sapiens [sequence omitted]

SEQ ID NO: 16538 - protein, 251 aa, Homo sapiens; identical to SEQ ID NO: 13622

SEQ ID NO: 16539 - protein, 671 aa, Homo sapiens
MQPDMSLNVIKMKSSDFLESAELDSGGFGKVSLCFHRTQGLMIMKTVYKGPNCIEHNEALLEEAKMMNRLRHSRVVKLLGVIIEEGKYSLVMEYMEKGNLMHVLKAEMSTPLSVKGRIILEIIEGMCYLHGKGVIHKDLKPENILVDNDFHIKIADLGLASFKMWSKLNNEEHNELREVDGTAKKNGGTLYYMAPEHLNDVNAKPTEKSDVYSFAVVLWAIFANKEPYENAICEQQLIMCIKSGNRPDVDDITEYCPREIISLMKLCWEANPEARPTFPGIEEKFRPFYLSQLEESVEEDVKSLKKEYSNENAVVKRMQSLQLDCVAVPSSRSNSATEQPGSLHSSQGLGMGPVEESWFAPSLEHPQEENEPSLQSKLQDEANYHLYGSRMDRQTKQQPRQNVAYNREEERRRRVSHDPFAQQRPYENFQNTEGKGTAYSSAASHGNAVHQPSGLTSQPQVLYQNNGLYSSHGFGTRPLDPGTAGPRVWYRPIPSHMPSLHNIPVPETNYLGNTPTMPFSSLPPTDESIKYTIYNSTGIQIGAYNYMEIGGTSSSLLDSTNTNFKEEPAAKYQAIFDNTTSLTDKHLDPIRENLGKHWKNCARKLGFTQSQIDEIDHDYERDGLKEKVYQMLQKWVMREGIKGATVGKLAQALHQCSRIDLLSSLIYVSQN

SEQ ID NO: 16540 - protein, 616 aa, Homo sapiens
MEILQNSPFLRGLCRTSAPADLQYDNTSELFRISTFAKFPSTAPVTERSLARAGFFYTGICDRVQCFRCNVTIDNWQTGECPAERHKQMSPNCAFIQSLPSTANLLSSSHSAFSPLRNATILQLNLPAVTSASGQTDEQVGYLNMSNLAPSSPLSSRGVEDMSHQRPSACHNPSMRREQDRLDTFQNWTLTTITPAELAKAGFYYLSQGDRVACFSCGGHLSNWEPGDRAMSEHQRHYPNCRFVRGDRADNISIAGGLANVSNPAMQQCEERLLTFVNWPARIPVRPDQLAKAGFYYVGRNDDVKCFCCDGGLRCWESGDDPWVEHAKWFPRCEYLLQEKGQEFVHQIQARFPRLFEQLLNNGDSREFVDPPVVHLGPGEERSEDAVMMNTPVVKAALEMGFDRNLVKQTVQSKILTSGENYKTVQELVSDLLSAEDEKREEEREMFAEEMASDGFTFLKKHHAALTQRLKSVQSLMDHLLEENVISQKEYDTIRNCTSVKQQTGQLIDLVLSKGNAAAEVFRNWIKKNDVYLLRELMAQTNEAVSPSQDLSDLPMEEQLRRLQEERTCKVCMDKEVNIVFIPCGHLVVCKECAPSLRKCPICRGMVKGTVRTFLS

SEQ ID NO: 16541 - protein, 501 aa, Homo sapiens
MAAASVTPPGSLELLQPGFSKTLLGTKLEAKYLCSACRNVLRRPFQAQCGHRYCSFCLASILSSGPQNCAACVHEGIYEEGISILESSSAFPDNAARREVESLPAVCPSDGCTWKGTLKEYESCHEGRCPLMLTECPACKGLVRLGEKERHLEHECPERSLSCRHCRAPCCGADVKAHHEVCPKFPLTCDGCGKKKIPREKFQDHVKTCGKCRVPCRFHAIGCLETVEGEKQQEHEVQWLREHLAMLLSSVLEAKPLLGDQSHAGSELLQRCESLEKKTATFENIVCVLNREVERVAMTAEACSRQHRLDQDKIEALSSKVQQLERSIGLKDLAMADLEQKVLEMEASTYDGVFIWKISDFARKRQEAVAGRIPAIFSPAFYTSRYGYKMCLRIYLNGDGTGRGTHLSLFFVVMKGPNDALLRWPFNQKVTLMLLDQNNREHVIDAFRPDVTSSSFQRPVNDMNIASGCPLFCPVSKMEAKNSYVRDDAIFIKAIVDLTGL

SEQ ID NO: 16542 - protein, 826 aa, Homo sapiens; identical to SEQ ID NO: 15084

SEQ ID NO: 16543 - protein, 213 aa, Homo sapiens
MPRRAENWDEAEVGAEEAGVEEYGPEEDGGEESGAEESGPEESGPEELGAEEEMEAGRPRPVLRSVNSREPSQVIFCNRSPRVVLPVWLNFDGEPQPYPTLPPGTGRRIHSYRGHLWLFRDAGTHDGLLVNQTELFVPSLNVDGQPIFANITLPVYTLKERCLQVVRSLVKPENYRRLDIVRSLYEDLEDHPNVQKDLERLTQERIAHQRMGD

SEQ ID NO: 16544 - protein, 492 aa, Homo sapiens
MEPSSKKLTGRLMLAVGGAVLGSLQFGYNTGVINAPQKVIEEFYNQTWVHRYGESILPTTLTTLWSLSVAIFSVGGMIGSFSVGLFVNRFGRRNSMLMMNLLAFVSAVLMGFSKLGKSFEMLILGRFIIGVYCGLTTGFVPMYVGEVSPTALRGALGTLHQLGIVVGILIAQVFGLDSIMGNKDLWPLLLSIIFIPALLQCIVLPFCPESPRFLLINRNEENRAKSVLKKLRGTADVTHDLQEMKEESRQMMREKKVTILELFRSPAYRQPILIAVVLQLSQQLSGINAVFYYSTSIFEKAGVQQPVYATIGSGIVNTAFTVVSLFVVERAGRRTLHLIGLAGMAGCAILMTIALALLEQLPWMSYLSIVAIFGFVAFFEVGPGPIPWFIVAELFSQGPRPAAIAVAGFSNWTSNFIVGMCFQYVEQLCGPYVFIIFTVLLVLFFIFTYFKVPETKGRTFDEIASGFRQGGASQSDKTPEELFHPLGADSQV

SEQ ID NO: 16545 - protein, 262 aa, Homo sapiens; identical to SEQ ID NO: 7716

SEQ ID NO: 16546 - protein, 630 aa, Homo sapiens
MELQPPEASIAVVSIPRQLPGSHSEAGVQGLSAGDDSELGSHCVAQTGLELLASGDPLPSASQNAEMIETGSDCVTQAGLQLLASSDPPALASKNAEVTGTMSQDTEVDMKEVELNELEPEKQPMNAASGAAMSLAGAEKNGLVKIKVAEDEAEAAAAAKFTGLSKEELLKVAGSPGWVRTRWALLLLFWLGWLGMLAGAVVIIVRAPRCRELPAQKWWHTGALYRIGDLQAFQGHGAGNLAGLKGRLDYLSSLKVKGLVLGPIHKNQKDDVAQTDLLQIDPNFGSKEDFDSLLQSAKKKSIRVILDLTPNYRGENSWFSTQVDTVATKVKDALEFWLQAGVDGFQVRDIENLKDASSFLAEWQNITKGFSEDRLLIAGTNSSDLQQILSLLESNKDLLLTSSYLSDSGSTGEHTKSLVTQYLNATGNRWCSWSLSQARLLTSFLPAQLLRLYQLMLFTLPGTPVFSYGDEIGLDAAALPGQPMEAPVMLWDESSFPDIPGAVSANMTVKGQSEDPGSLLSLFRRLSDQRSKERSLLHGDFHAFSAGPGLFSYIRHWDQNERFLVVLNFGDVGLSAGLQASDLPASASLPAKADLLLSTQPGREEGSPLELERLKLEPHEGLLLRFPYAA

SEQ ID NO: 16547 - protein, 541 aa, Homo sapiens
MVADPPRDSKGLAAAEPTANGGLALASIEDQGAAAGGYCGSRDQVRRCLRANLLVLLTVVAVVAGVALGLGVSGAGGALALGPERLSAFVFPGELLLRLLRMIILPLVVCSLIGGAASLDPGALGRLGAWALLFFLVTTLLASALGVGLALALQPGAASAAINASVGAAGSAENAPSKEVLDSFLDLARNIFPSNLVSAAFRSYSTTYEERNITGTRVKVPVGQEVEGMNILGLVVFAIVFGVALRKLGPEGELLIRFFNSFNEATMVLVSWIMWYAPVGIMFLVAGKIVEMEDVGLLFARLGKYILCCLLGHAIHGLLVLPLIYFLFTRKNPYRFLWGIVTPLATAFGTSSSSATLPLMMKCVEENNGVAKHISRFILPIGATVNMDGAALFQCVAAVFIAQLSQQSLDFVKIITILVTATASSVGAAGIPAGGVLTLAIILEAVNLPVDHISLILAVDWLVDRSCTVLNVEGDALGAGLLQNYVDRTESRSTEPELIQVKSELPLDPLPVPTEEGNPLLKHYRGPAGDATVASEKESVM

SEQ ID NO: 16548 - protein, 629 aa, Homo sapiens
MGCKVLLNIGQQMLRRKVVDCSREETRLSRCLNTFDLVALGVGSTLGAGVYVLAGAVARENAGPAIVISFLIAALASVLAGLCYGEFGARVPKTGSAYLYSYVTVGELWAFITGWNLILSYIIGTSSVARAWSATFDELIGRPIGEFSRTHMTLNAPGVLAENPDIFAVIIILILTGLLTLGVKESAMVNKIFTCINVLVLGFIMVSGFVKGSVKNWQLTEEDFGNTSGRLCLNNDTKEGKPGVGGFMPFGFSGVLSGAATCFYAFVGFDCIATTGEEVKNPQKAIPVGIVASLLICFIAYFGVSAALTLMMPYFCLDNNSPLPDAFKHVGWEGAKYAVAVGSLCALSASLLGSMFPMPRVIYAMAEDGLLFKFLANVNDRTKTPIIATLASGAVAAVMAFLFDLKDLVDLMSIGTLLAYSLVAACVLVLRYQPEQPNLVYQMASTSDELDPADQNELASTNDSQLGFLPEAEMFSLKTILSPKNMEPSKISGLIVNISTSLIAVLIITFCIVTVLGREALTKGALWAVFLLAGSALLCAVVTGVIWRQPESKTKLSFKVPFLPVLPILSIFVNVYLMMQLDQGTWVRFAVWMLIGFIIYFGYGLWHSEEASLDADQARTPDGNLDQCK

SEQ ID NO: 16549 - protein, 658 aa, Homo sapiens
MIPCRAALTFARCLIRRKIVTLDSLEDTKLCRCLSTMDLIALGVGSTLGAGVYVLAGEVAKADSGPSIVVSFLIAALASVMAGLCYAEFGARVPKTGSAYLYTYVTVGELWAFITGWNLILSYVIGTSSVARAWSGTFDELLSKQIGQFLRTYFRMNYTGLAEYPDFFAVCLILLLAGLLSFGVKESAWVNKVFTAVNILVLLFVMVAGFVKGNVANWKISEEFLKNISASAREPPSENGTSIYGAGGFMPYGFTGTLAGAATCFYAFVGFDCIATTGEEVRNPQKAIPIGIVTSLLVCFMAYFGVSAALTLMMPYYLLDEKSPLPVAFEYVGWGPAKYVVAAGSLCALSTSLLGSIFPMPRVIYAMAEDGLLFKCLAQINSKTKTPIIATLSSGAVAALMAFLFDLKALVDMMSIGTLMAYSLVAACVLILRYQPGLSYDQPKCSPEKDGLGSSPRVTSKSESQVTMLQRQGFSMRTLFCPSLLPTQQSASLVSFLVGFLAFLVLGLSVLTTYGVHAITRLEAWSLALLALFLVLFVAIVLTIWRQPQNQQKVAFMVPFLPFLPAFSILVNIYLMVQLSADTWVRFSIWMAIGFLIYFSYGIRHSLEGHLRDENNEEDAYPDNVHAAAEEKSAIQANDHHPRNLSSPFIFHEKTSEF

SEQ ID NO: 16550 - protein, 619 aa, Homo sapiens
MPWQAFRRFGQKLVRRRTLESGMAETRLARCLSTLDLVALGVGSTLGAGVYVLAGEVAKDKAGPSIVICFLVAALSSVLAGLCYAEFGARVPRSGSAYLYSYVTVGELWAFTTGWNLILSYVIGTASVARAWSSAFDNLIGNHISKTLQGSIALHVPHVLAEYPDFFALGLVLLLTGLLALGASESALVTKVFTGVNLLVLGFVMISGFVKGDVHNWKLTEEDYELAMAELNDTYSLGPLGSGGFVPFGFEGILRGAATCFYAFVGFDCIATTGEEAQNPQRSIPMGIVISLSVCFLAYFAVSSALTLMMPYYQLQPESPLPEAFLYIGWAPARYVVAVGSLCALSTSLLGSMFPMPRVIYAMAEDGLLFRVLARIHTGTRTPIIATVVSGIIAAFMAFLFKLTDLVDLMSIGTLLAYSLVSICVLILRYQPDQETKTGEEVELQEEAITTESEKLTLWGLFFPLNSIPTPLSGQIVYVCSSLLAVLLTALCLVLAQWSVPLLSGDLLWTAVVVLLLLLIIGIIVVIWRQPQSSTPLHFKVPALPLLPLMSIFVNIYLMMQMTAGTWARFGVWMLIGFAIYFGYGIQHSLEEIKSNQPSRKSRAKTVDLDPGTLYVHSV

SEQ ID NO: 16551 - protein, 635 aa, Homo sapiens
MARGLPTIASLARLCQKLNRLKPLEDSTMETSLRRCLSTLDLTLLGVGGMVGSGLYVLTGAVAKEVAGPAVLLSFGVAAVASLLAALCYAEFGARVPRTGSAYLFTYVSMGELWAFLIGWNVLLEYIIGGAAVARAWSGYLDSMFSHSIRNFTETHVGSWQVPLLGHYPDFLAAGIILLASAFVSCGARVSSWLNHTFSAISLLVILFIVILGFILAQPHNWSADEGGFAPFGFSGVMAGTASCFYAFVGFDVIAASSEEAQNPRRSVPLAIAISLAIAAGAYILVSTVLTLMVPWHSLDPDSALADAFYQRGYRWAGFIVAAGSICAMNTVLLSLLFSLPRIVYAMAADGLFFQVFAHVHPRTQVPVAGTLAFGLLTAFLALLLDLESLVQFLSLGTLLAYTFVATSIIVLRFQKSSPPSSPGPASPGPLTKQQSSFSDHLQLVGTVHASVPEPGELKPALRPYLGFLDGYSPGAVVTWALGVMLASAITIGCVLVFGNSTLHLPHWGYILLLLLTSVMFLLSLLVLGAHQQQYREDLFQIPMVPLIPALSIVLNICLMLKLSYLTWVRFSIWLLMGLAVYFGYGIRHSKENQRELPGLNSTHYVVFPRGSLEETVQAMQPPSQAPAQDPGHME

SEQ ID NO: 16552 - protein, 507 aa, Homo sapiens
MAGAGPKRRALAAPAAEEKEEAREKMLAAKSADGSAPAGEGEGVTLQRNITLLNGVAIIVGTIIGSGIFVTPTGVLKEAGSPGLALVVWAACGVFSIVGALCYAELGTTISKSGGDYAYMLEVYGSLPAFLKLWIELLIIRPSSQYIVALVFATYLLKPLFPTCPVPEEAAKLVACLCVLLLTAVNCYSVKAATRVQDAFAAAKLLALALIILLGFVQIGKGDVSNLDPNFSFEGTKLDVGNIVLALYSGLFAYGGWNYLNFVTEEMINPYRNLPLAIIISLPIVTLVYVLTNLAYFTTLSTEQMLSSEAVAVDFGNYHLGVMSWIIPVFVGLSCFGSVNGSLFTSSRLFFVGSREGHLPSILSMIHPQLLTPVPSLVFTCVMTLLYAFSKDIFSVINFFSFFNWLCVALAIIGMIWLRHRKPELERPIKVNLALPVFFILACLFLIAVSFWKTPVECGIGFTIILSGLPVYFFGVWWKNKPKWLLQGIFSTTVLCQKLMQVVPQET

SEQ ID NO: 16553 - protein, 515 aa, Homo sapiens
MEAREPGRPTPTYHLVPNTSQSQVEEDVSSPPQRSSETMQLKKEISLLNGVSLVVGNMIGSGIFVSPKGVLVHTASYGMSLIVWAIGGLFSVVGALCYAELGTTITKSGASYAYILEAFGGFIAFIRLWVSLLVVEPTGQAIIAITFANYIIQPSFPSCDPPYLACRLLAAACICLLTFVNCAYVKWGTRVQDTFTYAKVVALIAIIVMGLVKLCQGHSEHFQDAFEGSSWDMGNLSLALYSALFSYSGWDTLNFVTEEIKNPERNLPLAIGISMPIVTLIYILTNVAYYTVLNISDVLSSDAVAVTFADQTFGMFSWTIPIAVALSCFGGLNASIFASSRLFFVGSREGHLPDLLSMIHIERFTPIPALLFNCTMALIYLIVEDVFQLINYFSFSYWFFVGLSVVGQLYLRWKEPKRPRPLKLSVFFPIVFCICSVFLVIVPLFTDTINSLIGIGIALSGVPFYFMGVYLPESRRPLFIRNVLAAITRGTQQLCFCVLTELDVAEEKKDERKTD

SEQ ID NO: 16554 - protein, 511 aa, Homo sapiens
MVDSTEYEVASQPEVETSPLGDGASPGPEQVKLKKEISLLNGVCLIVGNMIGSGIFVSPKGVLIYSASFGLSLVIWAVGGLFSVFGALCYAELGTTIKKSGASYAYILEAFGGFLAFIRLWTSLLIIEPTSQAIIAITFANYMVQPLFPSCFAPYAASRLLAAACICLLTFINCAYVKWGTLVQDIFTYAKVLALIAVIVAGIVRLGQGASTHFENSFEGSSFAVGDIALALYSALFSYSGWDTLNYVTEEIKNPERNLPLSIGISMPIVTIIYILTNVAYYTVLDMRDILASDAVAVTFADQIFGIFNWIIPLSVALSCFGGLNASIVAASRLFFVGSREGHLPDAICMIHVERFTPVPSLLFNGIMALIYLCVEDIFQLINYYSFSYWFFVGLSIVGQLYLRWKEPDRPRPLKLSVFFPIVFCLCTIFLVAVPLYSDTINSLIGIAIALSGLPFYFLIIRVPEHKRPLYLRRIVGSATRYLQVLCMSVAAEMDLEDGGEMPKQRDPKSN

SEQ ID NO: 16555 - protein, 535 aa, Homo sapiens
MEEGARHRNNTEKKHPGGGESDASPEAGSGGGGVALKKEIGLVSACGIIVGNIIGSGIFVSPKGVLENAGSVGLALIVWIVTGFITVVGALCYAELGVTIPKSGGDYSYVKDIFGGLAGFLRLWIAVLVIYPTNQAVIALTFSNYVLQPLFPTCFPPESGLRLLAAICLLLLTWVNCSSVRWATRVQDIFTAGKLLALALIIIMGIVQICKGEYFWLEPKNAFENFQEPDIGLVALAFLQGSFAYGGWNFLNYVTEELVDPYKNLPRAIFISIPLVTFVYVFANVAYVTAMSPQELLASNAVAVTFGEKLLGVMAWIMPISVALSTFGGVNGSLFTSSRLFFAGAREGHLPSVLAMIHVKRCTPIPALLFTCISTLLMLVTSDMYTLINYVGFINYLFYGVTVAGQIVLRWKKPDIPRPIKINLLFPIIYLLFWAFLLVFSLWSEPVVCGIGLAIMLTGVPVYFLGVYWQHKPKCFSDFIELLTLVSQKMCVVVYPEVERGSGTEEANEDMEEQQQPMYQPTPTKDKDVAGQPQP

SEQ ID NO: 16556 - protein, 487 aa, Homo sapiens
MGDTGLRKRREDEKSIQSQEPKTTSLQKELGLISGISIIVGTIIGSGIFVSPKSVLSNTEAVGPCLIIWAACGVLATLGALCFAELGTMITKSGGEYPYLMEAYGPIPAYLFSWASLIVIKPTSFAIICLSFSEYVCAPFYVGCKPPQIVVKCLAAAAILFISTVNSLSVRLGSYVQNIFTAAKLVIVAIIIISGLVLLAQGNTKNFDNSFEGAQLSVGAISLAFYNGLWAYDGWNQLNYITEELRNPYRNLPLAIIIGIPLVTACYILMNVSYFTVMTATELLQSQAVAVTFGDRVLYPASWIVPLFVAFSTIGAANGTCFTAGRLIYVAGREGHMLKVLSYISVRRLTPAPAIIFYGIIATIYIIPGDINSLVNYFSFAAWLFYGLTILGLIVMRFTRKELERPIKVPVVIPVLMTLISVFLVLAPIISKPTWEYLYCVLFILSGLLFYFLFVHYKFGWAQKISKPITMHLQMLMEVVPPEEDPE

SEQ ID NO: 16557 - protein, 523 aa, Homo sapiens
MAGHTQQPSGRGNPRPAPSPSPVPGTVPGASERVALKKEIGLLSACTIIIGNIIGSGIFISPKGVLEHSGSVGLALFVWVLGGGVTALGSLCYAELGVAIPKSGGDYAYVTEIFGGLAGFLLLWSAVLIMYPTSLAVISMTFSNYVLQPVFPNCIPPTTASRVLSMACLMLLTWVNSSSVRWATRIQDMFTGGKLLALSLIIGVGLLQIFQGHFEELRPSNAFAFWMTPSVGHLALAFLQGSFAFSGWNFLNYVTEEMVDARKNLPRAIFISIPLVTFVYTFTNIAYFTAMSPQELLSSNAVAVTFGEKLLGYFSWVMPVSVALSTFGGINGYLFTYSRLCFSGAREGHLPSLLAMIHVRHCTPIPALLVCCGATAVIMLVGDTYTLINYVSFINYLCYGVTILGLLLLRWRRPALHRPIKVNLLIPVAYLVFWAFLLVFSFISEPMVCGVGVIIILTGVPIFFLGVFWRSKPKCVHRLTESMTHWGQELCFVVYPQDAPEEEENGPCPPSLLPATDKPSKPQ

SEQ ID NO: 16558 - protein, 501 aa, Homo sapiens
MVRKPVVSTISKGGYLQGNVNGRLPSLGNKEPPGQEKVQLKRKVTLLRGVSIIIGTIIGAGIFISPKGVLQNTGSVGMSLTIWTVCGVLSLFGALSYAELGTTIKKSGGHYTYILEVFGPLPAFVRVWVELLIIRPAATAVISLAFGRYILEPFFIQCEIPELAIKLITAVGITVVMVLNSMSVSWSARIQIFLTFCKLTAILIIIVPGVMQLIKGQTQNFKDAFSGRDSSITRLPLAFYYGMYAYAGWFYLNFVTEEVENPEKTIPLAICISMAIVTIGYVLTNVAYFTTINAEELLLSNAVAVTFSERLLGNFSLAVPIFVALSCFGSMNGGVFAVSRLFYVASREGHLPEILSMIHVRKHTPLPAVIVLHPLTMIMLFSGDLDSLLNFLSFARWLFIGLAVAGLIYLRYKCPDMHRPFKVPLFIPALFSFTCLFMVALSLYSDPFSTGIGFVITLTGVPAYYLFIIWDKKPRWFRIMSEKITRTLQIILEVVPEEDKL

SEQ ID NO: 16559 - protein, 470 aa, Homo sapiens
MDRGEKIQLKRVFGYWWGTSFLLINIIGAGIFVSPKGVLAYSCMNVGVSLCVWAGCAILAMTSTLCSAEISISFPCSGAQYYFLKRYFGSTVAFLNLWTSLFLGSGVVAGQALLLAEYSIQPFFPSCSVPKLPKKCLALAMLWIVGILTSRGVKEVTWLQIASSVLKVSILSFISLTGVVFLIRGKKENVERFQNAFDAELPDISHLIQAIFQGYFAYSGGACFTLIAGELKKPRTTIPKCIFTALPLVTVVYLLVNISYLTVLTPREILSSDAVAITWADRAFPSLAWIMPFAISTSLFSNLLISIFKSSRPIYLASQEGQLPLLFNTLNSHSSPFTAVLLLVTLGSLAIILTSLIDLINYIFFTGSLWSILLMIGILRRRYQEPNLSIPYKVFLSFPLATIVIDVGLVVIPLVKSPNVHYVYVLLLVLSGLLFYIPLIHFKIRLAWFEKMTCYLQLLFNICLPDVSEE

SEQ ID NO: 16560 - protein, 771 aa, Homo sapiens
MSGFFTSLDPRRVQWGAAWYAMHSRILRTKPVESMLEGTGTTTAHGTKLAQVLTTVDLISLGVGSCVGTGMYVVSGLVAKEMAGPGVIVSFIIAAVASILSGVCYAEFGVRVPKTTGSAYTYSYVTVGEFVAFFIGWNLILEYLIGTAAGASALSSMFDSLANHTISRWMADSVGTLNGLGKGEESYPDLLALLIAVIVTIIVALGVKNSIGFNNVLNVLNLAVWVFIMIAGLFFINGKYWAEGQFLPHGWSGVLQGAATCFYAFIGFDIIATTGEEAKNPNTSIPYAITASLVICLTAYVSVSVILTLMVPYYTIDTESPLMEMFVAHGFYAAKFVVAIGSVAGLTVSLLGSLFPMPRVIYAMAGDGLLFRFLAHVSSYTETPVVACIVSGFLAALLALLVSLRDLIEMMSIGTLLAYTLVSVCVLLLRYQPESDIDGFVKFLSEEHTKKKEGILADCEKEACSPVSEGDEFSGPATNTCGAKNLPSLGDNEMLIGKSDKSTYNVNHPNYGTVDMTTGIEADESENIYLIKLKKLIGPHYYTMRIRLGLPGKMDRPTAATGHTVTICVLLLFILMFIFCSFIIFGSDYISEQSWWAILLVVLMVLLISTLVFVILQQPENPKKLPYMAPCLPFVPAFAMLVNIYLMLKLSTITWIRFAVWCFVGLLIYFGYGIWNSTLEISAREEALHQSTYQRYDVDDPFSVEEGFSYATEGESQEDWGGPTEDKGFYYQQMSDAKANGRTSSKAKSKSKHKQNSEALIANDELDYSPE

SEQ ID NO: 16561 - protein, 630 aa, Homo sapiens; identical to SEQ ID NO: 16546

SEQ ID NO: 16562 - protein, 658 aa, Homo sapiens; identical to SEQ ID NO: 16549

SEQ ID NO: 16563 - protein, 619 aa, Homo sapiens; identical to SEQ ID NO: 16550

SEQ ID NO: 16564 - protein, 635 aa, Homo sapiens; identical to SEQ ID NO: 16551

SEQ ID NO: 16565 - protein, 1483 aa, Homo sapiens
MAPLLGRKPFPLVKPLPGEEPLFTIPHTQEAFRTREEYEARLERYSERIWTCKSTGSSQLTHKEAWEEEQEVAELLKEEFPAWYEKLVLEMVHHNTASLEKLVDTAWLEIMTKYAVGEECDFEVGKEKMLKVKIVKIHPLEKVDEEATEKKSDGACDSPSSDKENSSQIAQDHQKKETVVKEDEGRRESINDRARRSPRKLPTSLKKGERKWAPPKFLPHKYDVKLQNEDKIISNVPADSLIRTERPPNKEIVRYFIRHNALRAGTGENAPWVVEDELVKKYSLPSKFSDFLLDPYKYMTLNPSTKRKNTGSPDRKPSKKSKTDNSSLSSPLNPKLWCHVHLKKSLSGSPLKVKNSKNSKSPEEHLEEMMKMMSPNKLHTNFHIPKKGPPAKKPGKHSDKPLKAKGRSKGILNGQKSTGNSKSPKKGLKTPKTKMKQMTLLDMAKGTQKMTRAPRNSGGTPRTSSKPHKHLPPAALHLIAYYKENKDREDKRSALSCVISKTARLLSSEDRARLPEELRSLVQKRYELLEHKKRWASMSEEQRKEYLKKKREELKKKLKEKAKERREKEMLERLEKQKRYEDQELTGKNLPAFRLVDTPEGLPNTLFGDVAMVVEFLSCYSGLLLPDAQYPITAVSLMEALSADKGGFLYLNRVLVILLQTLLQDEIAEDYGELGMKLSEIPLTLHSVSELVRLCLRRSDVQEESEGSDTDDNKDSAAFEDNEVQDEFLEKLETSEFFELTSEEKLQILTALCHRILMTYSVQDHMETRQQMSAELWKERLAVLKEENDKKRAEKQKRKEMEAKNKENGKVENGLGKTDRKKEIVKFEPQVDTEAEDMISAVKSRRLLAIQAKKEREIQEREMKVKLERQAEEERIRKHKAAAEKAFQEGIAKAKLVMRRTPIGTDRNHNRYWLFSDEVPGLFIEKGWVHDSIDYRFNHHCKDHTVSGDEDYCPRSKKANLGKNASMNTQHGTATEVAVETTTPKQGQNLWFLCDSQKELDELLNCLHPQGIRESQLKERLEKRYQDIIHSIHLARKPNLGLKSCDGNQELLNFLRSDLIEVATRLQKGGLGYVEETSEFEARVISLEKLKDFGECVIALQASVIKKFLQGFMAPKQKRRKLQSEDSAKTEEVDEEKKMVEEAKVASALEKWKTAIREAQTFSRMHVLLGMLDACIKWDMSAENARCKVCRKKGEDDKLILCDECNKAFHLFCLRPALYEVPDGEWQCPACQPATARRNSRGRNYTEESASEDSEDDESDEEEEEEEEEEEEEDYEVAGLRLRPRKTIRGKHSVIPPAARSGRRPGKKPHSTRRSQPKAPPVDDAEVDELVLQTKRSSRRQSLELQKCEEILHKIVKYRFSWPFREPVTRDEAEDYYDVITHPMDFQTVQNKCSCGSYRSVQEFLTDMKQVFTNAEVYNCRGSHVLSCMVKTEQCLVALLHKHLPGHPYVRRKRKKFPDRLAEDEGDSEPEAVGQSRGRRQKK

SEQ ID NO: 16566 - protein, 530 aa, Homo sapiens
MTRDFKPGDLIFAKMKGYPHWPARVDEVPDGAVKPPTNKLPIFFFGTHETAFLGPKDIFPYSENKEKYGKPNKRKGFNEGLWEIDNNPKVKFSSQQAATKQSNASSDVEVEEKETSVSKEDTDHEEKASNEDVTKAVDITTPKAARRGRKRKAEKQVETEEAGVVTTATASVNLKVSPKRGRPAATEVKIPKPRGRPKMVKQPCPSESDIITEEDKSKKKGQEEKQPKKQPKKDEEGQKEEDKPRKEPDKKEGKKEVESKRKNLAKTGVTSTSDSEEEGDDQEGEKKRKGGRNFQTAHRRNMLKGQHEKEAADRKRKQEEQMETEQQNKDEGKKPEVKKVEKKRETSMDSRLQRIHAEIKNSLKIDNLDVNRCIEALDELASLQVTMQQAQKHTEMITTLKKIRRFKVSQVIMEKSTMLYNKFKNMFLVGEGDSVITQVLNKSLAEQRQHEEANKTKDQGKKGPNKKLEKEQTGSKTLNGGSDAQDGNQPQHNGESNEDSKDNHEASTKKKPSSEERETEISLKDSTLDN

SEQ ID NO: 16567 - protein, 228 aa, Homo sapiens
MSVSEIFVELQGFLAAEQDIREEIRKVVQSLEQTAREILTLLQGVHQGAGFQDIPKRCLKAREHFGTVKTHLTSLKTKFPAEQYYRFHEHWRFVLQRLVFLAAFVVYLETETLVTREAVTEILGIEPDREKGFHLDVEDYLSGVLILASELSRLSVNSVTAGDYSRPLHISTFINELDSGFRLLNLKNDSLRKRYDGLKYDVKKVEEVVYDLSIRGFNKETAAACVEK

SEQ ID NO: 16568 - protein, 140 aa, Homo sapiens; identical to SEQ ID NO: 14672

SEQ ID NO: 16569 - protein, 176 aa, Homo sapiens; identical to SEQ ID NO: 14673

SEQ ID NO: 16570 - protein, 164 aa, Homo sapiens; identical to SEQ ID NO: 14674

SEQ ID NO: 16571 - protein, 207 aa, Homo sapiens; identical to SEQ ID NO: 14675

SEQ ID NO: 16572 - protein, 182 aa, Homo sapiens; identical to SEQ ID NO: 14676

SEQ ID NO: 16573 - protein, 171 aa, Homo sapiens; identical to SEQ ID NO: 2331

SEQ ID NO: 16574 - protein, 552 aa, Homo sapiens
MAEKQKHDGRVKIGHYVLGDTLGVGTFGKVKIGEHQLTGHKVAVKILNRQKIRSLDVVGKIKREIQNLKLFRHPHIIKLYQVISTPTDFFMVMEYVSGGELFDYICKHGRVEEMEARRLFQQILSAVDYCHRHMVVHRDLKPENVLLDAHMNAKIADFGLSNMMSDGEFLRTSCGSPNYAAPEVISGRLYAGPEVDIWSCGVILYALLCGTLPFDDEHVPTLFKKIRGGVFYIPEYLNRSVATLLMHMLQVDPLKRATIKDIREHEWFKQDLPSYLFPEDPSYDANVIDDEAVKEVCEKFECTESEVMNSLYSGDPQDQLAVAYHLIIDNRRIMNQASEFYLASSPPSGSFMDDSAMHIPPGLKPHPERMPPLIADSPKARCPLDALNTTKPKSLAVKKAKWHLGIRSQSKPYDIMAEVYRAMKQLDFEWKVVNAYHLRVRRKNPVTGNYVKMSLQLYLVDNRSYLLDFKSIDDEVVEQRSGSSTPQRSCSAAGLHRPRSSFDSTTAESHSLSGSLTGSLTGSTLSSVSPRLGSHTMDFFEMCASLITTLAR

SEQ ID NO: 16575 - protein, 270 aa, Homo sapiens
MGNTSSERAALERHGGHKTPRRDSSGGTKDGDRPKILMDSPEDADLFHSEEIKAPEKEEFLAWQHDLEVNDKAPAQARPTVFRWTGGGKEVYLSGSFNNWSKLPLTRSHNNFVAILDLPEGEHQYKFFVDGQWTHDPSEPIVTSQLGTVNNIIQVKKTDFEVFDALMVDSQKCSDVSELSSSPPGPYHQEPYVCKPEERFRAPPILPPHLLQVILNKDTGISCDPALLPEPNHVMLNHLYALSIKDGVMVLSATHRYKKKYVTTLLYKPI

SEQ ID NO: 16576 - protein, 595 aa, Homo sapiens
MPACCSCSDVFQYETNKVTRIQSMNYGTIKWFFHVIIFSYVCFALVSDKLYQRKEPVISSVHTKVKGIAEVKEEIVENGVKKLVHSVFDTADYTFPLQGNSFFVMTNFLKTEGQEQRLCPEYPTRRTLCSSDRGCKKGWMDPQSKGIQTGRCVVYEGNQKTCEVSAWCPIEAVEEAPRPALLNSAENFTVLIKNNIDFPGHNYTTRNILPGLNITCTFHKTQNPQCPIFRLGDIFRETGDNFSDVAIQGGIMGIEIYWDCNLDRWFHHCRPKYSFRRLDDKTTNVSLYPGYNFRYAKYYKENNVEKRTLIKVFGIRFDILVFGTGGKFDIIQLVVYIGSTLSYFGLAAVFIDFLIDTYSSNCCRSHIYPWCKCCQPCVVNEYYYRKKCESIVEPKPTLKYVSFVDESHIRMVNQQLLGRSLQDVKGQEVPRPAMDFTDLSRLPLALHDTPPIPGQPEEIQLLRKEATPRSRDSPVWCQCGSCLPSQLPESHRCLEELCCRKKPGACITTSELFRKLVLSRHVLQFLLLYQEPLLALDVDSTNSRLRHCAYRCYATWRFGSQDMADFAILPSCCRWRIRKEFPKSEGQYSGFKSPY

SEQ ID NO: 16577 - protein, 1465 aa, Homo sapiens
MPEQERQITAREGASRKILSKLSLPTRAWEPAMKKSFAFDNVGYEGGLDGLGPSSQVATSTVRILGMTCQSCVKSIEDRISNLKGIISMKVSLEQGSATVKYVPSVVCLQQVCHQIGDMGFEASIAEGKAASWPSRSLPAQEAVVKLRVEGMTCQSCVSSIEGKVRKLQGVVRVKVSLSNQEAVITYQPYLIQPEDLRDHVNDMGFEAAIKSKVAPLSLGPIDIERLQSTNPKRPLSSANQNFNNSETLGHQGSHVVTLQLRIDGMHCKSCVLNIEENIGQLLGVQSIQVSLENKTAQVKYDPSCTSPVALQRAIEALPPGNFKVSLPDGAEGSGTDHRSSSSHSPGSPPRNQVQGTCSTTLIAIAGMTCASCVHSIEGMISQLEGVQQISVSLAEGTATVLYNPSVISPEELRAAIEDMGFEASVVSESCSTNPLGNHSAGNSMVQTTDGTPTSVQEVAPHTGRLPANHAPDILAKSPQSTRAVAPQKCFLQIKGMTCASCVSNIERNLQKEAGVLSVLVALMAGKAEIKYDPEVIQPLEIAQFIQDLGFEAAVMEDYAGSDGNIELTITGMTCASCVHNIESKLTRTNGITYASVALATSKALVKFDPEIIGPRDIIKIIEEIGFHASLAQRNPNAHHLDHKMEIKQWKKSFLCSLVFGIPVMALMIYMLIPSNEPHQSMVLDHNIIPGLSILNLIFFILCTFVQLLGGWYFYVQAYKSLRHRSANMDVLIVLATSIAYVYSLVILVVAVAEKAERSPVTFFDTPPMLFVFIALGRWLEHLAKSKTSEALAKLMSLQATEATVVTLGEDNLIIREEQVPMELVQRGDIVKVVPGGKFPVDGKVLEGNTMADESLITGEAMPVTKKPGSTVIAGSINAHGSVLIKATHVGNDTTLAQIVKLVEEAQMSKAPIQQLADRFSGYFVPFIIIMSTLTLVVWIVIGFIDFGVVQRYFPNPNKHISQTEVIIRFAFQTSITVLCIACPCSLGLATPTAVMVGTGVAAQNGILIKGGKPLEMAHKIKTVMFDKTGTITHGVPRVMRVLLLGDVATLPLRKVLAVVGTAEASSEHPLGVAVTKYCKEELGTETLGYCTDFQAVPGCGIGCKVSNVEGILAHSERPLSAPASHLNEAGSLPAEKDAVPQTFSVLIGNREWLRRNGLTISSDVSDAMTDHEMKGQTAILVAIDGVLCGMIAIADAVKQEAALAVHTLQSMGVDVVLITGDNRKTARAIATQVGINKVFAEVLPSHKVAKVQELQNKGKKVAMVGDGVNDSPALAQADMGVAIGTGTDVAIEAADVVLIRNDLLDVVASIHLSKRTVRRIRINLVLALIYNLVGIPIAAGVFMPIGIVLQPWMGSAAMAASSVSVVLSSLQLKCYKKPDLERYEAQAHGHMKPLTASQVSVHIGMDDRWRDSPRATPWDQVSYVSQVSLSSLTSDKPSRHSAAADDDGDKWSLLLNGRDEEQYI

SEQ ID NO: 16578 - protein, 1271 aa, Homo sapiens
MVDPVGFAEAWKAQFPDSEPPRMELRSVGDIEQELERCKASIRRLEQEVNQERFRMIYLQTLLAKEKKSYDRQRWGFRRAAQAPDGASEPRASASRPQPAPADGADPPPAEEPEARPDGEGSPGKARPGTARRPGAAASGERDDRGPPASVAALRSNFERIRKGHGQPGADAEKPFYVNVEFHHERGLVKVNDKEVSDRISSLGSQAMQMERKKSQHGAGSSVGDASRPPYRGRSSESSCGVDGDYEDAELNPRFLKDNLIDANGGSRPPWPPLEYQPYQSIYVGGMMEGEGKGPLLRSQSTSEQEKRLTWPRRSYSPRSFEDCGGGYTPDCSSNENLTSSEEDFSSGQSSRVSPSPTTYRMFRDKSRSPSQNSQQSFDSSSPPTPQCHKRHRHCPVVVSEATIVGVRKTGQIWPNDGEGAFHGDADGSFGTPPGYGCAADRAEEQRRHQDGLPYIDDSPSSSPHLSSKGRGSRDALVSGALESTKASELDLEKGLEMRKWVLSGILASEETYLSHLEALLLPMKPLKAAATTSQPVLTSQQIETIFFKVPELYEIHKEFYDGLFPRVQQWSHQQRVGDLFQKLASQLGVYRAFVDNYGVAMEMAEKCCQANAQFAEISENLRARSNKDAKDPTTKNSLETLLYKPVDRVTRSTLVLHDLLKHTPASHPDHPLLQDALRISQNFLSSINEEITPRRQSMTVKKGEHRQLLKDSFMVELVEGARKLRHVFLFTDLLLCTKLKKQSGGKTQQYDCKWYIPLTDLSFQMVDELEAVPNIPLVPDEELDALKIKISQIKNDIQREKRANKGSKATERLKKKLSEQESLLLLMSPSMAFRVHSRNGKSYTFLISSDYERAEWRENIREQQKKCFRSFSLTSVELQMLTNSCVKLQTVHSIPLTINKEDDESPGLYGFLNVIVHSATGFKQSSNLYCTLEVDSFGYFVNKAKTRVYRDTAEPNWNEEFEIELEGSQTLRILCYEKCYNKTKIPKEDGESTDRLMGKGQVQLDPQALQDRDWQRTVIAMNGIEVKLSVKFNSREFSLKRMPSRKQTGVFGVKIAVVTKRERSKVPYIVRQCVEEIERRGMEEVGIYRVSGVATDIQALKAAFDVNNKDVSVMMSEMDVNAIAGTLKLYFRELPEPLFTDEFYPNFAEGIALSDPVAKESCMLNLLLSLPEANLLTFLFLLDHLKRVAEKEAVNKMSLHNLATVFGPTLLRPSEKESKLPANPSQPITMTDSWSLEVMSQVQVLLYFLQLEAIPAPDSKRQSILFSTEV

SEQ ID NO: 16579 - protein, 1130 aa, Homo sapiens
MLEICLKLVGCKSKKGLSSSSSCYLEEALQRPVASDFEPQGLSEAARWNSKENLLAGPSENDPNLFVALYDFVASGDNTLSITKGEKLRVLGYNHNGEWCEAQTKNGQGWVPSNYITPVNSLEKHSWYHGPVSRNAAEYLLSSGINGSFLVRESESSPGQRSISLRYEGRVYHYRINTASDGKLYVSSESRFNTLAELVHHHSTVADGLITTLHYPAPKRNKPTVYGVSPNYDKWEMERTDITMKHKLGGGQYGEVYEGVWKKYSLTVAVKTLKEDTMEVEEFLKEAAVMKEIKHPNLVQLLGVCTREPPFYIITEFMTYGNLLDYLRECNRQEVNAVVLLYMATQISSAMEYLEKKNFIHRDLAARNCLVGENHLVKVADFGLSRLMTGDTYTAHAGAKFPIKWTAPESLAYNKFSIKSDVWAFGVLLWEIATYGMSPYPGIDLSQVYELLEKDYRMERPEGCPEKVYELMRACWQWNPSDRPSFAEIHQAFETMFQESSISDEVEKELGKQGVRGAVSTLLQAPELPTKTRTSRRAAEHRDTTDVPEMPHSKGQGESDPLDHEPAVSPLLPRKERGPPEGGLNEDERLLPKDKKTNLFSALIKKKKKTAPTPPKRSSSFREMDGQPERRGAGEEEGRDISNGALAFTPLDTADPAKSPKPSNGAGVPNGALRESGGSGFRSPHLWKKSSTLTSSRLATGEEEGGGSSSKRFLRSCSASCVPHGAKDTEWRSVTLPRDLQSTGRQFDSSTFGGHKSEKPALPRKRAGENRSDQVTRGTVTPPPRLVKKNEEAADEVFKDIMESSPGSSPPNLTPKPLRRQVTVAPASGLPHKEEAGKGSALGTPAAAEPVTPTSKAGSGAPGGTSKGPAEESRVRRHKHSSESPGRDKGKLSRLKPAPPPPPAASAGKAGGKPSQSPSQEAAGEAVLGAKTKATSLVDAVNSDAAKPSQPGEGLKKPVLPATPKPQSAKPSGTPISPAPVPSTLPSASSALAGDQPSSTAFIPLISTRVSLRKTRQPPERIASGAITKGVVLDSTEALCLAISRNSEQMASHSAVLEAGKNLYTFCVSYVDSIQQMRNKFAFREAINKLENNLRELQICPATAGSGPAATQDFSKLLSSVKEISDIVQR

SEQ ID NO: 16580 - protein, 655 aa, Homo sapiens
MSSSNVEVFIPVSQGNTNGFPATASNDLKAFTEGAVLSFHNICYRVKLKSGFLPCRKPVEKEILSNINGIMKPGLNAILGPTGGGKSSLLDVLAARKDPSGLSGDVLINGAPRPANFKCNSGYVVQDDVVMGTLTVRENLQFSAALRLATTMTNHEKNERINRVIQELGLDKVADSKVGTQFIRGVSGGERKRTSIGMELITDPSILFLDEPTTGLDSSTANAVLLLLKRMSKQGRTIIFSIHQPRYSIFKLFDSLTLLASGRLMFHGPAQEALGYFESAGYHCEAYNNPADFFLDIINGDSTAVALNREEDFKATEIIEPSKQDKPLIEKLAEIYVNSSFYKETKAELHQLSGGEKKKKITVFKEISYTTSFCHQLRWVSKRSFKNLLGNPQASIAQIIVTVVLGLVIGAIYFGLKNDSTGIQNRAGVLFFLTTNQCFSSVSAVELFVVEKKLFIHEYISGYYRVSSYFLGKLLSDLLPMRMLPSIIFTCIVYFMLGLKPKADAFFVMMFTLMMVAYSASSMALAIAAGQSVVSVATLLMTICFVFMMIFSGLLVNLTTIASWLSWLQYFSIPRYGFTALQHNEFLGQNFCPGLNATGNNPCNYATCTGEEYLVKQGIDLSPWGLWKNHVALACMIVIFLTIAYLKLLFLKKYS

SEQ ID NO: 16581 - protein, 1863 aa, Homo sapiens; identical to SEQ ID NO: 14811

SEQ ID NO: 16582 - protein, 3418 aa, Homo sapiens
MPIGSKERPTFFEIFKTRCNKADLGPISLNWFEELSSEAPPYNSEPAEESEHKNNNYEPNLFKTPQRKPSYNQLASTPIIFKEQGLTLPLYQSPVKELDKFKLDLGRNVPNSRHKSLRTVKTKMDQADDVSCPLLNSCLSESPVVLQCTHVTPQRDKSVVCGSLFHTPKFVKGRQTPKHISESLGAEVDPDMSWSSSLATPPTLSSTVLIVRNEEASETVFPHDTTANVKSYFSNHDESLKKNDRFIASVTDSENTNQREAASHGFGKTSGNSFKVNSCKDHIGKSMPNVLEDEVYETVVDTSEEDSFSLCFSKCRTKNLQKVRTSKTRKKIFHEANADECEKSKNQVKEKYSFVSEVEPNDTDPLDSNVANQKPFESGSDKISKEVVPSLACEWSQLTLSGLNGAQMEKIPLLHISSCDQNISEKDLLDTENKRKKDFLTSENSLPRISSLPKSEKPLNEETVVNKRDEEQHLESHTDCILAVKQAISGTSPVASSFQGIKKSIFRIRESPKETFNASFSGHMTDPNFKKETEASESGLEIHTVCSQKEDSLCPNLIDNGSWPATTTQNSVALKNAGLISTLKKKTNKFIYAIHDETSYKGKKIPKDQKSELINCSAQFEANAFEAPLTFANADSGLLHSSVKRSCSQNDSEEPTLSLTSSFGTILRKCSRNETCSNNTVISQDLDYKEAKCNKEKLQLFITPEADSLSCLQEGQCENDPKSKKVSDIKEEVLAAACHPVQHSKVEYSDTDFQSQKSLLYDHENASTLILTPTSKDVLSNLVMISRGKESYKMSDKLKGNNYESDVELTKNIPMEKNQDVCALNENYKNVELLPPEKYMRVASPSRKVQFNQNTNLRVIQKNQEETTSISKITVNPDSEELFSDNENNFVFQVANERNNLALGNTKELHETDLTCVNEPIFKNSTMVLYGDTGDKQATQVSIKKDLVYVLAEENKNSVKQHIKMTLGQDLKSDISLNIDKIPEKNNDYMNKWAGLLGPISNHSFGGSFRTASNKEIKLSEHNIKKSKMFFKDIEEQYPTSLACVEIVNTLALDNQKKLSKPQSINTVSAHLQSSVVVSDCKNSHITPQMLFSKQDFNSNHNLTPSQKAEITELSTILEESGSQFEFTQFRKPSYILQKSTFEVPENQMTILKTTSEECRDADLHVIMNAPSIGQVDSSKQFEGTVEIKRKFAGLLKNDCNKSASGYLTDENEVGFRGFYSAHGTKLNVSTEALQKAVKLFSDIENISEETSAEVHPISLSSSKCHDSVVSMFKIENHNDKTVSEKNNKCQLILQNNIEMTTGTFVEEITENYKRNTENEDNKYTAASRNSHNLEFDGSDSSKNDTVCIHKDETDLLFTDQHNICLKLSGQFMKEGNTQIKEDLSDLTFLEVAKAQEACHGNTSNKEQLTATKTEQNIKDFETSDTFFQTASGKNISVAKESFNKIVNFFDQKPEELHNFSLNSELHSDIRKNKMDILSYEETDIVKHKILKESVPVGTGNQLVTFQGQPERDEKIKEPTLLGFHTASGKKVKIAKESLDKVKNLFDEKEQGTSEITSFSHQWAKTLKYREACKDLELACETIEITAAPKCKEMQNSLNNDKNLVSIETVVPPKLLSDNLCRQTENLKTSKSIFLKVKVHENVEKETAKSPATCYTNQSPYSVIENSALAFYTSCSRKTSVSQTSLLEAKKWLREGIFDGQPERINTADYVGNYLYENNSNSTIAENDKNHLSEKQDTYLSNSSMSNSYSYHSDEVYNDSGYLSKNKLDSGIEPVLKNVEDQKNTSFSKVISNVKDANAYPQTVNEDICVEELVTSSSPCKNKNAAIKLSISNSNNFEVGPPAFRIASGKIVCVSHETIKKVKDIFTDSFSKVIKENNENKSKICQTKIMAGCYEALDDSEDILHNSLDNDECSTHSHKVFADIQSEEILQHNQNMSGLEKVSKISPCDVSLETSDICKCSIGKLHKSVSSANTCGIFSTASGKSVQVSDASLQNARQVFSEIEDSTKQVFSKVLFKSNEHSDQLTREENTAIRTPEHLISQKGFSYNVVNSSAFSGFSTASGKQVSILESSLHKVKGVLEEFDLIRTEHSLHYSPTSRQNVSKILPRVDKRNPEHCVNSEMEKTCSKEFKLSNNLNVEGGSSENNHSIKVSPYLSQFQQDKQQLVLGTKVSLVENIHVLGKEQASPKNVKMEIGKTETFSDVPVKTNIEVCSTYSKDSENYFETEAVEIAKAFMEDDELTDSKLPSHATHSLFTCPENEEMVLSNSRIGKRRGEPLILVGEPSIKRNLLNEFDRIIENQEKSLKASKSTPDGTIKDRRLFMHHVSLEPITCVPFRTTKERQEIQNPNFTAPGQEFLSKSHLYEHLTLEKSSSNLAVSGHPFYQVSATRNEKMRHLITTGRPTKVFVPPFKTKSHFHRVEQCVRNINLEENRQKQNIDGHGSDDSKNKINDNEIHQFNKNNSNQAAAVTFTKCEEEPLDLITSLQNARDIQDMRIKKKQRQRVFPQPGSLYLAKTSTLPRISLKAAVGGQVPSACSHKQLYTYGVSKHCIKINSKNAESFQFHTEDYFGKESLWTGKGIQLADGGWLIPSNDGKAGKEEFYRALCDTPGVDPKLISRIWVYNHYRWIIWKLAAMECAFPKEFANRCLSPERVLLQLKYRYDTEIDRSRRSAIKKIMERDDTAAKTLVLCVSDIISLSANISETSSNKTSSADTQKVAIIELTDGWYAVKAQLDPPLLAVLKNGRLTVGQKIILHGAELVGSPDACTPLEAPESLMLKISANSTRPARWYTKLGFFPDPRPFPLPLSSLFSDGGNVGCVDVIIQRAYPIQWMEKTSSGLYIFRNEREEEKEAAKYVEAQQKRLEALFTKIQEEFEEHEENTTKPYLPSRALTRQQVRALQDGAELYEAVKNAADPAYLEGYFSEEQLRALNNHRQMLNDKKQAQIQLEIRKAMESAEQKEQGLSRDVTTVWKLRIVSYSKKEKDSVILSIWRPSSDLYSLLTEGKRYRIYHLATSKSKSKSERANIQLAATKKTQYQQLPVSDEILFQIYQPREPLHFSKFLDPDFQPSCSEVDLIGFVVSVVKKTGLAPFVYLSDECYNLLAIKFWIDLNEDIIKPHMLIAASNLQWRPESKSGLLTLFAGDFSVFSASPKEGHFQETFNKMKNTVENIDILCNEAENKLMHILHANDPKWSTPTKDCTSGPYTAQIIPGTGNKLLMSSPNCEIYYQSPLSLCMAKRKSVSTPVSAQMTSKSCKGEKEIDDQKNCKKRRALDFLSRLPLPPPVSPICTFVSPAAQKAFQPPRSCGTKYETPIKKKELNSPQMTPFKKFNEISLLESNSIADEELALINTQALLSGSTGEKQFISVSESTRTAPTSSEDYLRLKRRCTTSLIKEQESSQASTEECEKNKQDTITTKKYI

SEQ ID NO: 16583 - protein, 61 aa, Homo sapiens
MKRFLFLLLTISLLVMVQIQTGLSGQNDTSQTSSPSASSNISGGIFLFFVANAIIHLFCFS

SEQ ID NO: 16584 - protein, 497 aa, Homo sapiens [sequence omitted]

SEQ ID NO: 16585 - protein, 260 aa, Homo sapiens [sequence omitted]

SEQ ID NO: 16586 - protein, 187 aa, Homo sapiens
MVGSLNCIVAVSQNMGIGKNGDLPWPPLRNEFRYFQRMTTTSSVEGKQNLVIMGKKTWFSIPEKNRPLKGRINLVLSRELKEPPQGAHFLSRSLDDALKLTEQPELANKVDMVWIVGGSSVYKEAMNHPGHLKLFVTRIMQDFESDTFFPEIDLEKYKLLPEYPGVLSDVQEEKGIKYKFEVYEKND

SEQ ID NO: 16587 - protein, 1025 aa, Homo sapiens
MAPVLSKDSADIESILALNPRTQTHATLCSTSAKKLDKKHWKRNPDKNCFNCEKLENNFDDIKHTTLGERGALREAMRCLKCADAPCQKSCPTNLDIKSFITSIANKNYYGAAKMIFSDNPLGLTCGMVCPTSDLCVGGCNLYATEEGPINIGGLQQFATEVFKAMSIPQIRNPSLPPPEKMSEAYSAKIALFGAGPASISCASFLARLGYSDITIFEKQEYVGGLSTSEIPQFRLPYDVVNFEIELMKDLGVKIICGKSLSVNEMTLSTLKEKGYKAAFIGIGLPEPNKDAIFQGLTQDQGFYTSKDFLPLVAKGSKAGMCACHSPLPSIRGVVIVLGAGDTAFDCATSALRCGARRVFIVFRKGFVNIRAVPEEMELAKEEKCEFLPFLSPRKVIVKGGRIVAMQFVRTEQDETGKWNEDEDQMVHLKADVVISAFGSVLSDPKVKEALSPIKFNRWGLPEVDPETMQTSEAWVFAGGDVVGLANTTVESVNDGKQASWYIHKYVQSQYGASVSAKPELPLFYTPIDLVDISVEMAGLKFINPFGLASATPATSTSMIRRAFEAGWGFALTKTFSLDKDIVTNVSPRIIRGTTSGPMYGPGQSSFLNIELISEKTAAYWCQSVTELKADFPDNIVIASIMCSYNKNDWTELAKKSEDSGADALELNLSCPHGMGERGMGLACGQDPELVRNICRWVRQAVQIPFFAKLTPNVTDIVSIARAAKEGGANGVTATNTVSGLMGLKSDGTPWPAVGIAKRTTYGGVSGTAIRPIALRAVTSIARALPGFPILATGGIDSAESGLQFLHSGASVLQVCSAIQNQDFTVIEDYCTGLKALLYLKSIEELQDWDGQSPATVSHQKGKPVPRIAELMDKKLPSFGPYLEQRKKIIAENKIRLKEQNVAFSPLKRNCFIPKRPIPTIKDVIGKALQYLGTFGELSNVEQVVAMIDEEMCINCGKCYMTCNDSGYQAIQFDPETHLPTITDTCTGCTLCLSVCPIVDCIKMVSRTTPYEPKRGVPLSVNPVC

SEQ ID NO: 16588 - protein, 1210 aa, Homo sapiens [sequence omitted]

SEQ ID NO: 16589 - protein, 297 aa, Homo sapiens
MDPGKDKEGVPQPSGPPARKKFVIPLDEDEVPPGVAKPLFRSTQSLPTVDTSAQAAPQTYAEYAISQPLEGAGATCPTGSEPLAGETPNQALKPGAKSNSIIVSPRQRGNPVLKFVRNVPWEFGDVIPDYVLGQSTCALFLSLRYHNLHPDYIHGRLQSLGKNFALRVLLVQVDVKDPQQALKELAKMCILADCTLILAWSPEEAGRYLETYKAYEQKPADLLMEKLEQDFVSRVTECLTTVKSVNKTDSQTLLTTFGSLEQLIAASREDLALCPGLGPQKARRLFDVLHEPFLKVP

SEQ ID NO: 16590 - protein, 595 aa, Homo sapiens [sequence omitted]

SEQ ID NO: 16591 - protein, 254 aa, Homo sapiens; identical to SEQ ID NO: 5202

SEQ ID NO: 16592 - protein, 1255 aa, Homo sapiens [sequence omitted]

SEQ ID NO: 16593 - protein, 1367 aa, Homo sapiens
MKSGSGGGSPTSLWGLLFLSAALSLWPTSGEICGPGIDIRNDYQQLKRLENCTVIEGYLHILLISKAEDYRSYRFPKLTVITEYLLLFRVAGLESLGDLFPNLTVIRGWKLFYNYALVIFEMTNLKDIGLYNLRNITRGAIRIEKNADLCYLSTVDWSLILDAVSNNYIVGNKPPKECGDLCPGTMEEKPMCEKTTINNEYNYRCWTTNRCQKMCPSTCGKRACTENNECCHPECLGSCSAPDNDTACVACRHYYYAGVCVPACPPNTYRFEGWRCVDRDFCANILSAESSDSEGFVIHDGECMQECPSGFIRNGSQSMYCIPCEGPCPKVCEEEKKTKTIDSVTSAQMLQGCTIFKGNLLINIRRGNNIASELENFMGLIEVVTGYVKIRHSHALVSLSFLKNLRLILGEEQLEGNYSFYVLDNQNLQQLWDWDHRNLTIKAGKMYFAFNPKLCVSEIYRMEEVTGTKGRQSKGDINTRNNGERASCESDVLHFTSTTTSKNRIIITWHRYRPPDYRDLISFTVYYKEAPFKNVTEYDGQDACGSNSWNMVDVDLPPNKDVEPGILLHGLKPWTQYAVYVKAVTLTMVENDHIRGAKSEILYIRTNASVPSIPLDVLSASNSSSQLIVKWNPPSLPNGNLSYYIVRWQRQPQDGYLYRHNYCSKDKIPIRKYADGTIDIEEVTENPKTEVCGGEKGPCCACPKTEAEKQAEKEEAEYRKVFENFLHNSIFVPRPERKRRDVMQVANTTMSSRSRNTTAADTYNITDPEELETEYPFFESRVDNKERTVISNLRPFTLYRIDIHSCNHEAEKLGCSASNFVFARTMPAEGADDIPGPVTWEPRPENSIFLKWPEPENPNGLILMYEIKYGSQVEDQRECVSRQEYRKYGGAKLNRLNPGNYTARIQATSLSGNGSWTDPVFFYVQAKTGYENFIHLIIALPVAVLLIVGGLVIMLYVFHRKRNNSRLGNGVLYASVNPEYFSAADVYVPDEWEVAREKITMSRELGQGSFGMVYEGVAKGVVKDEPETRVAIKTVNEAASMRERIEFLNEASVMKEFNCHHVVRLLGVVSQGQPTLVIMELMTRGDLKSYLRSLRPEMENNPVLAPPSLSKMIQMAGEIADGMAYLNANKFVHRDLAARNCMVAEDFTVKIGDFGMTRDIYETDYYRKGGKGLLPVRWMSPESLKDGVFTTYSDVWSFGVVLWEIATLAEQPYQGLSNEQVLRFVMEGGLLDKPDNCPDMLFELMRMCWQYNPKMRPSFLEIISSIKEEMEPGFREVSFYYSEENKLPEPEELDLEPENMESVPLDPSASSSSLPLPDRHSGHKAENGPGPGVLVLRASFDERQPYAHMNGGRKNERALPLPQSSTC

SEQ ID NO: 16594 - protein, 189 aa, Homo sapiens [sequence omitted]

SEQ ID NO: 16595 - protein, 1280 aa, Homo sapiens
MDLEGDRNGGAKKKNFFKLNNKSEKDKKEKKPTVSVFSMFRYSNWLDKLYMVVGTLAAIIHGAGLPLMMLVFGEMTDIFANAGNLEDLMSNITNRSDINDTGFFMNLEEDMTRYAYYYSGIGAGVLVAAYIQVSFWCLAAGRQIHKIRKQFFHAIMRQEIGWFDVHDVGELNTRLTDDVSKINEGIGDKIGMFFQSMATFFTGFIVGFTRGWKLTLVILAISPVLGLSAAVWAKILSSFTDKELLAYAKAGAVAEEVLAAIRTVIAFGGQKKELERYNKNLEEAKRIGIKKAITANISIGAAFLLIYASYALAFWYGTTLVLSGEYSIGQVLTVFFSVLIGAFSVGQASPSIEAFANARGAAYEIFKIIDNKPSIDSYSKSGHKPDNIKGNLEFRNVHFSYPSRKEVKILKGLNLKVQSGQTVALVGNSGCGKSTTVQLMQRLYDPTEGMVSVDGQDIRTINVRFLREIIGVVSQEPVLFATTIAENIRYGRENVTMDEIEKAVKEANAYDFIMKLPHKFDTLVGERGAQLSGGQKQRIAIARALVRNPKILLLDEATSALDTESEAVVQVALDKARKGRTTIVIAHRLSTVRNADVIAGFDDGVIVEKGNHDELMKEKGIYFKLVTMQTAGNEVELENAADESKSEIDALEMSSNDSRSSLIRKRSTRRSVRGSQAQDRKLSTKEALDESIPPVSFWRIMKLNLTEWPYFVVGVFCAIINGGLQPAFAIIFSKIIGVFTRIDDPETKRQNSNLFSLLFLALGIISFITFFLQGFTFGKAGEILTKRLRYMVFRSMLRQDVSWFDDPKNTTGALTTRLANDAAQVKGAIGSRLAVITQNIANLGTGIIISFIYGWQLTLLLLAIVPIIAIAGVVEMKMLSGQALKDKKELEGSGKIATEAIENFRTVVSLTQEQKFEHMYAQSLQVPYRNSLRKAHIFGITFSFTQAMMYFSYAGCFRFGAYLVAHKLMSFEDVLLVFSAVVFGAMAVGQVSSFAPDYAKAKISAAHIIMIIEKTPLIDSYSTEGLMPNTLEGNVTFGEVVFNYPTRPDIPVLQGLSLEVKKGQTLALVGSSGCGKSTVVQLLERFYDPLAGKVLLDGKEIKRLNVQWLRAHLGIVSQEPILFDCSIAENIAYGDNSRVVSQEEIVRAAKEANIHAFIESLPNKYSTKVGDKGTQLSGGQKQRIAIARALVRQPHILLLDEATSALDTESEKVVQEALDKAREGRTCIVIAHRLSTIQNADLIVVFQNGRVKEHGTHQQLLAQKGIYFSMVSVQAGTKRQ

SEQ ID NO: 16596 - protein, 207 aa, Homo sapiens
MDKDCEMKRTTLDSPLGKLELSGCEQGLHEIKLLGKGTSAADAVEVPAPAAVLGGPEPLMQCTAWLNAYFHQPEAIEEFPVPALHHPVFQQESFTRQVLWKLLKVVKFGEVISYQQLAALAGNPKAARAVGGAMRGNPVPILIPCHRVVCSSGAVGNYSGGLAVKEWLLAHEGHRLGKPGLGGSSGLAGAWLKGAGATSGSPPAGRN

SEQ ID NO: 16597 - protein, 1531 aa, Homo sapiens
MALRGFCSADGSDPLWDWNVTWNTSNPDFTKCFQNTVLVWVPCFYLWACFPFYFLYLSRHDRGYIQMTPLNKTKTALGFLLWIVCWADLFYSFWERSRGIFLAPVFLVSPTLLGITMLLATFLIQLERRKGVQSSGIMLTFWLVALVCALAILRSKIMTALKEDAQVDLFRDITFYVYFSLLLIQLVLSCFSDRSPLFSETIHDPNPCPESSASFLSRITFWWITGLIVRGYRQPLEGSDLWSLNKEDTSEQVVPVLVKNWKKECAKTRKQPVKVVYSSKDPAQPKESSKVDANEEVEALIVKSPQKEWNPSLFKVLYKTFGPYFLMSFFFKAIHDLMMFSGPQILKLLIKFVNDTKAPDWQGYFYTVLLFVTACLQTLVLHQYFHICFVSGMRIKTAVIGAVYRKALVITNSARKSSTVGEIVNLMSVDAQRFMDLATYINMIWSAPLQVILALYLLWLNLGPSVLAGVAVMVLMVPVNAVMAMKTKTYQVAHMKSKDNRIKLMNEILNGIKVLKLYAWELAFKDKVLAIRQEELKVLKKSAYLSAVGTFTWVCTPFLVALCTFAVYVTIDENNILDAQTAFVSLALFNILRFPLNILPMVISSIVQASVSLKRLRIFLSHEELEPDSIERRPVKDGGGTNSITVRNATFTWARSDPPTLNGITFSIPEGALVAVVGQVGCGKSSLLSALLAEMDKVEGHVAIKGSVAYVPQQAWIQNDSLRENILFGCQLEEPYYRSVIQACALLPDLEILPSGDRTEIGEKGVNLSGGQKQRVSLARAVYSNADIYLFDDPLSAVDAHVGKHIFENVIGPKGMLKNKTRILVTHSMSYLPQVDVIIVMSGGKISEMGSYQELLARDGAFAEFLRTYASTEQEQDAEENGVTGVSGPGKEAKQMENGMLVTDSAGKQLQRQLSSSSSYSGDISRHHNSTAELQKAEAKKEETWKLMEADKAQTGQVKLSVYWDYMKAIGLFISFLSIFLFMCNHVSALASNYWLSLWTDDPIVNGTQEHTKVRLSVYGALGISQGIAVFGYSMAVSIGGILASRCLHVDLLHSILRSPMSFFERTPSGNLVNRFSKELDTVDSMIPEVIKMFMGSLFNVIGACIVILLATPIAAIIIPPLGLIYFFVQRFYVASSRQLKRLESVSRSPVYSHFNETLLGVSVIRAFEEQERFIHQSDLKVDENQKAYYPSIVANRWLAVRLECVGNCIVLFAALFAVISRHSLSAGLVGLSVSYSLQVTTYLNWLVRMSSEMETNIVAVERLKEYSETEKEAPWQIQETAPPSSWPQVGRVEFRNYCLRYREDLDFVLRHINVTINGGEKVGIVGRTGAGKSSLTLGLFRINESAEGEIIIDGINIAKIGLHDLRFKITIIPQDPVLFSGSLRMNLDPFSQYSDEEVWTSLELAHLKDFVSALPDKLDHECAEGGENLSVGQRQLVCLARALLRKTKILVLDEATAAVDLETDDLIQSTIRTQFEDCTVLTIAHRLNTIMDYTRVIVLDKGEIQEYGAPSDLLQQRGLFYSMAKDAGLV

SEQ ID NO: 16598 - protein, 933 aa, Homo sapiens; identical to SEQ ID NO: 15481

SEQ ID NO: 16599 - protein, 173 aa, Homo sapiens
MQSELCFADIHDSDGSSSSSHQSLKSTAKWAASLENLLEDPEGVKRFREFLKKEFSEENVLFWLACEDFKKMQDKTQMQEKAKEIYMTFLSSKASSQVNVEGQSRLNEKILEEPHPLMFQKLQDQIFNLMKYDSYSRFLKSDLFLKHKRTEEEEEDLPDAQTAAKRASRIYNT

SEQ ID NO: 16600 - protein, 225 aa, Homo sapiens
MVTHSKFPAAGMSRPLDTSLRLKTFSSKSEYQLVVNAVRKLQESGFYWSAVTGGEANLLLSAEPAGTFLIRDSSDQRHFFTLSVKTQSGTKNLRIQCEGGSFSLQSDPRSTQPVPRFDCVLKLVHHYMPPPGAPSFPSPPTEPSSEVPEQPSAQPLPGSPPRRAYYIYSGGEKIPLVLSRPLSSNVATLQHLCRKTVNGHLDSYEKVTQLPGPIREFLDQYDAPL

SEQ ID NO: 16601 - protein, 313 aa, Homo sapiens
MPVAGSELPRRPLPPAAQERDAEPRPPHGELQYLGQIQHILRCGVRKDDRTGTGTLSVFGMQARYSLRDEFPLLTTKRVFWKGVLEELLWFIKGSTNAKELSSKGVKIWDANGSRDFLDSLGFSTREEGDLGPVYGFQWRHFGAEYRDMESDYSGQGVDQLQRVIDTIKTNPDDRRIIMCAWNPRDLPLMALPPCHALCQFYVVNSELSCQLYQRSGDMGLGVPFNIASYALLTYMIAHITGLKPGDFIHTLGDAHIYLNHIEPLKIQLQREPRPFPKLRILRKVEKIDDFKAEDFQIEGYNPHPTIKMEMAV

SEQ ID NO: 16602 - protein, 533 aa, Homo sapiens
MAVESQGGRPLVLGLLLCVLGPVVSHAGKILLIPVDGSHWLSMLGAIQQLQQRGHEIVVLAPDASLYIRDGAFYTLKTYPVPFQREDVKESFVSLGHNVFENDSFLQRVIKTYKKIKKDSAMLLSGCSHLLHNKELMASLAESSFDVMLTDPFLPCSPIVAQYLSLPTVFFLHALPCSLEFEATQCPNPFSYVPRPLSSHSDHMTFLQRVKNMLIAFSQNFLCDVVYSPYATLASEFLQREVTVQDLLSSASVWLFRSDFVKDYPRPIMPNMVFVGGINCLHQNPLSQEFEAYINASGEHGIVVFSLGSMVSEIPEKKAMAIADALGKIPQTVLWRYTGTRPSNLANNTILVKWLPQNDLLGHPMTRAFITHAGSHGVYESICNGVPMVMMPLFGDQMDNAKRMETKGAGVTLNVLEMTSEDLENALKAVINDKSYKENIMRLSSLHKDRPVEPLDLAVFWVEFVMRHKGAPHLRPAAHDLTWYQYHSLDVIGFLLAVVLTVAFITFKCCAYGYRKCLGKKGRVKKAHKSKTH

SEQ ID NO: 16603 - protein, 2002 aa, Homo sapiens; identical to SEQ ID NO: 15749

SEQ ID NO: 16604 - protein, 912 aa, Homo sapiens; identical to SEQ ID NO: 14891

SEQ ID NO: 16605 - protein, 193 aa, Homo sapiens
MAAIRKKLVIVGDGACGKTCLLIVFSKDQFPEVYVPTVFENYVADIEVDGKQVELALWDTAGQEDYDRLRPLSYPDTDVILMCFSIDSPDSLENIPEKWTPEVKHFCPNVPIILVGNKKDLRNDEHTRRELAKMKQEPVKPEEGRDMANRIGAFGYMECSAKTKDGVREVFEMATRAALQARRGKKKSGCLVL

SEQ ID NO: 16606 - protein, 845 aa, Homo sapiens
MELWRQCTHWLIQCRVLPPSHRVTWDGAQVCELAQALRDGVLLCQLLNNLLPHAINLREVNLRPQMSQFLCLKNIRTFLSTCCEKFGLKRSELFEAFDLFDVQDFGKVIYTLSALSWTPIAQNRGIMPFPTEEESVGDEDIYSGLSDQIDDTVEEDEDLYDCVENEEAEGDEIYEDLMRSEPVSMPPKMTEYDKRCCCLREIQQTEEKYTDTLGSIQQHFLKPLQRFLKPQDIEIIFINIEDLLRVHTHFLKEMKEALGTPGAANLYQVFIKYKERFLVYGRYCSQVESASKHLDRVAAAREDVQMKLEECSQRANNGRFTLRDLLMVPMQRVLKYHLLLQELVKHTQEAMEKENLRLALDAMRDLAQCVNEVKRDNETLRQITNFQLSIENLDQSLAHYGRPKIDGELKITSVERRSKMDRYAFLLDKALLICKRRGDSYDLKDFVNLHSFQVRDDSSGDRDNKKWSHMFLLIEDQGAQGYELFFKTRELKKKWMEQFEMAISNIYPENATANGHDFQMFSFEETTSCKACQMLLRGTFYQGYRCHRCRASAHKECLGRVPPCGRHGQDFPGTMKKDKLHRRAQDKKRNELGLPKMEVFQEYYGLPPPPGAIGPFLRLNPGDIVELTKAEAEQNWWEGRNTSTNEIGWFPCNRVKPYVHGPPQDLSVHLWYAGPMERAGAESILANRSDGTFLVRQRVKDAAEFAISIKYNVEVKHIKIMTAEGLYRITEKKAFRGLTELVEFYQQNSLKDCFKSLDTTLQFPFKEPEKRTISRPAVGSTKYFGTAKARYDFCARDRSELSLKEGDIIKILNKKGQQGWWRGEIYGRVGWFPANYVEEDYSEYC

SEQ ID NO: 16607 - protein, 158 aa, Homo sapiens
MSSAIERKSLDPSEEPVDEVLQIPPSLLTCGGCQQNIGDRYFLKAIDQYWHEDCLSCDLCGCRLGEVGRRLYYKLGRKLCRRDYLRLFGQDGLCASCDKRIRAYEMTMRVKDKVYHLECFKCAACQKHFCVGDRYLLINSDIVCEQDIYEWTKINGMI

SEQ ID NO: 16608 - protein, 331 aa, Homo sapiens; identical to SEQ ID NO: 15705

SEQ ID NO: 16609 - protein, 211 aa, Homo sapiens
MVAHNQVAADNAVSTAAEPRRRPEPSSSSSSSPAAPARPRPCPAVPAPAPGDTHFRTFRSHADYRRITRASALLDACGFYWGPLSVHGAHERLRAEPVGTFLVRDSRQRNCFFALSVKMASGPTSIRVHFQAGRFHLDGSRESFDCLFELLEHYVAAPRRMLGAPLRQRRVRPLQELCRQRIVATVGRENLARIPLNPVLRDYLSSFPFQI

SEQ ID NO: 16610 - protein, 283 aa, Homo sapiens; identical to SEQ ID NO: 13583

SEQ ID NO: 16611 - protein, 337 aa, Homo sapiens
MNSTCIEEQHDLDHYLFPIVYIFVIIVSIPANIGSLCVSFLQAKKESELGIYLFSLSLSDLLYALTLPLWIDYTWNKDNWTFSPALCKGSAFLMYMNFYSSTAFLTCIAVDRYLAVVYPLKFFFLRTRRFALMVSLSIWILETIFNAVMLWEDETVVEYCDAEKSNFTLCYDKYPLEKWQINLNLFRTCTGYAIPLVTILICNRKVYQAVRHNKATENKEKKRIIKLLVSITVTFVLCFTPFHVMLLIRCILEHAVNFEDHSNSGKRTYTMYRITVALTSLNCVADPILYCFVTETGRYDMWNILKFCTGRCNTSQRQRKRILSVSTKDTMELEVLE

SEQ ID NO: 16612 - protein, 1755 aa, Homo sapiens
MLSATPLYGNVHSWMNSERVRMCGASEDRKILVNDGDASKARLELREENPLNHNVVDASTAHRIDGLAALSMDRTGLIREGLRVPGNIVYSSLCGLGSEKGREAATSTLGGLGFSSERNPEMQFKPNTPETVEASAVSGKPPNGFSAIYKTPPGIQKSAVATAEALGLDRPASDKQSPLNINGASYLRLPWVNPYMEGATPAIYPFLDSPNKYSLNMYKALLPQQSYSLAQPLYSPVCTNGERFLYLPPPHYVGPHIPSSLASPMRLSTPSASPAIPPLVHCADKSLPWKMGVSPGNPVDSHAYPHIQNSKQPRVPSAKAVTSGLPGDTALLLPPSPRPSPRVHLPTQPAADTYSEFHKHYARISTSPSVALSKPYMTVSSEFPAARLSNGKYPKAPEGGEGAQPVPGHARKTAVQDRKDGSSPPLLEKQTVTKDVTDKPLDLSSKVVDVDASKADHMKKMAPTVLVHSRAGSGLVLSGSEIPKETLSPPGNGCAIYRSEIISTAPSSWVVPGPSPNEENNGKSMSLKNKALDWAIPQQRSSSCPRMGGTDAVITNVSGSVSSAGRPASASPAPNANADGTKTSRSSVETTPSVIQHVGQPPATPAKHSSSTSSKGAKASNPEPSFKANENGLPPSSIFLSPNEAFRSPPIPYPRSYLPYPAPEGIAVSPLSLHGKGPVYPHPVLLPNGSLFPGHLAPKPGLPYGLPTGRPEFVTYQDALGLGMVHPMLIPHTPIEITKEEKPERRSRSHERARYEDPTLRNRFSEILETSSTKLHPDVPTDKNLKPNPNWNQGKTVVKSDKLVYVDLLREEPDAKTDTNVSKPSFAAESVGQSAEPPKPSVEPALQQHRDFIALREELGRISDFHETYTFKQPVFTVSKDSVLAGTNKENLGLPVSTPFLEPPLGSDGPAVTFGKTQEDPKPFCVGSAPPSVDVTPTYTKDGADEAESNDGKVLKPKPSKLAKRIANSAGYVGDRFKCVTTELYADSSQLSREQRALQMEGLQEDSILCLPAAYCERAMMRFSELEMKEREGGHPATKDSEMCKFSPADWERLKGNQDKKPKSVTLEEAIAEQNESERCEYSVGNKHRDPFEAPEDKDLPVEKYFVERQPVSEPPADQVASDMPHSPTLRVDRKRKVSGDSSHTETTAEEVPEDPLLKAKRRRVSKDDWPEREMTNSSSNHLEDPHYSELTNLKVCIELTGLHPKKQRHLLHLRERWEQQVSAADGKPGRQSRKEVTQATQPEAIPQGTNITEEKPGRKRAEAKGNRSWSEESLKPSDNEQGLPVFSGSPPMKSLSSTSAGGKKQAQPSCAPASRPPAKQQKIKENQKTDVLCADEEEDCQAASLLQKYTDNSEKPSGKRLCKTKHLIPQESRRGLPLTGEYYVENADGKVTVRRFRKRPEPSSDYDLSPAKQEPKPFDRLQQLLPASQSTQLPCSSSPQETTQSRPMPPEARRLIVNKNAGETLLQRAARLGYEEVVLYCLENKICDVNHRDNAGYCALHEACARGWLNIVRHLLEYGADVNCSAQDGTRPLHDAVENDHLEIVRLLLSYGADPTLATYSGRTIMKMTHSELMEKFLTDYLNDLQGRNDDDASGTWDFYGSSVCEPDDESGYDVLANPPGPEDQDDDDDAYSDVFEFEFSETPLLPCYNIQVSVAQGPRNWLLLSDVLKKLKMSSRIFRCNFPNVEIVTIAEAEFYRQVSASLLFSCSKDLEAFNPESKELLDLVEFTNEIQTLLGSSVEWLHPSDLASDNYW

SEQ ID NO: 16613 - protein, 289 aa, Homo sapiens; identical to SEQ ID NO: 14650

SEQ ID NO: 16614 - protein, 664 aa, Homo sapiens; identical to SEQ ID NO: 12692

SEQ ID NO: 16615 - protein, 303 aa, Homo sapiens; identical to SEQ ID NO: 15310

SEQ ID NO: 16616 - protein, 254 aa, Homo sapiens; identical to SEQ ID NO: 14707

SEQ ID NO: 16617 - protein, 417 aa, Homo sapiens; identical to SEQ ID NO: 13608

SEQ ID NO: 16618 - protein, 250 aa, Homo sapiens [sequence omitted]

SEQ ID NO: 16619 - protein, 168 aa, Homo sapiens
MFQIPEFEPSEQEDSSSAERGLGPSPAGDGPSGSGKHHRQAPGLLWDASHQQEQPTSSSHHGGAGAVEIRSRHSSYPAGTEDDEGMGEEPSPFRGRSRSAPPNLWAAQRYGRELRRMSDEFVDSFKKGLPRPKSAGTATQMRQSSSWTRVFQSWWDRNLGRGSSAPSQ

SEQ ID NO: 16620 - protein, 184 aa, Homo sapiens
MLQMAGQCSQNEYFDSLLHACIPCQLRCSSNTPPLTCQRYCNASVTNSVKGTNAILWTCLGLSLIISLAVFVLMFLLRKINSEPLKDEFKNTGSGLLGMANIDLEKSRTGDEIILPRGLEYTVEECTCEDCIKSKPKVDSDHCFPLPAMEEGATILVTTKTNDYCKSLPAALSATEIEKSISAR

SEQ ID NO: 16621 - protein, 96 aa, Homo sapiens; identical to SEQ ID NO: 2121

SEQ ID NO: 16622 - protein, 97 aa, Homo sapiens; identical to SEQ ID NO: 2122

SEQ ID NO: 16623 - protein, 98 aa, Homo sapiens; identical to SEQ ID NO: 2123

SEQ ID NO: 16624 - protein, 93 aa, Homo sapiens; identical to SEQ ID NO: 2127

SEQ ID NO: 16625 - protein, 113 aa, Homo sapiens
MKVSVAALSCLMLVAVLGSQAQFINDAETELMMSKLPLENPVVLNSFHFAADCCTSYISQSIPCSLMKSYFETSSECSKPGVIFLTKKGRQVCAKPSGPGVQDCMKKLKPYSI

SEQ ID NO: 16626 - protein, 120 aa, Homo sapiens; identical to SEQ ID NO: 2131

SEQ ID NO: 16627 - protein, 94 aa, Homo sapiens; identical to SEQ ID NO: 2134

SEQ ID NO: 16628 - protein, 89 aa, Homo sapiens; identical to SEQ ID NO: 2136

SEQ ID NO: 16629 - protein, 98 aa, Homo sapiens; identical to SEQ ID NO: 2138

SEQ ID NO: 16630 - protein, 99 aa, Homo sapiens; identical to SEQ ID NO: 2139

SEQ ID NO: 16631 - protein, 96 aa, Homo sapiens; identical to SEQ ID NO: 2142

SEQ ID NO: 16632 - protein, 134 aa, Homo sapiens; identical to SEQ ID NO: 2145

SEQ ID NO: 16633 - protein, 93 aa, Homo sapiens; identical to SEQ ID NO: 2146

SEQ ID NO: 16634 - protein, 120 aa, Homo sapiens
MKVSVAALSCLMLVTALGSQARVTKDAETEFMMSKLPLENPVLLDRFHATSADCCISYTPRSIPCSLLESYFETNSECSKPGVIFLTKKGRRFCANPSDKQVQVCVRMLKLDTRIKTRKN

SEQ ID NO: 16635 - protein, 119 aa, Homo sapiens; identical to SEQ ID NO: 2150

SEQ ID NO: 16636 - protein, 150 aa, Homo sapiens; identical to SEQ ID NO: 2153

SEQ ID NO: 16637 - protein, 94 aa, Homo sapiens; identical to SEQ ID NO: 2156

SEQ ID NO: 16638 - protein, 112 aa, Homo sapiens; identical to SEQ ID NO: 2158

SEQ ID NO: 16639 - protein, 127 aa, Homo sapiens; identical to SEQ ID NO: 2160

SEQ ID NO: 16640 - protein, 92 aa, Homo sapiens; identical to SEQ ID NO: 2162

SEQ ID NO: 16641 - protein, 92 aa, Homo sapiens; identical to SEQ ID NO: 2164

SEQ ID NO: 16642 - protein, 91 aa, Homo sapiens; identical to SEQ ID NO: 2176

SEQ ID NO: 16643 - protein, 99 aa, Homo sapiens; identical to SEQ ID NO: 2181

SEQ ID NO: 16644 - protein, 99 aa, Homo sapiens; identical to SEQ ID NO: 2182

SEQ ID NO: 16645 - protein, 355 aa, Homo sapiens
METPNTTEDYDTTTEFDYGDATPCQKVNERAFGAQLLPPLYSLVFVIGLVGNILVVLVLVQYKRLKNMTSIYLLNLAISDLLFLFTLPFWIDYKLKDDWVFGDAMCKILSGFYYTGLYSEIFFIILLTIDRYLAIVHAVFALRARTVTFGVITSIIIWALAILASMPGLYFSKTQWEFTHHTCSLHFPHESLREWKLFQALKLNLFGLVLPLLVMIICYTGIIKILLRRPNEKKSKAVRLIFVIMIIFFLFWTPYNLTILISVFQDFLFTHECEQSRHLDLAVQVTEVIAYTHCCVNPVIYAFVGERFRKYLRQLFHRRVAVHLVKWLPFLSVDRLERVSSTSPSTGEHELSAGF

SEQ ID NO: 16646 - protein, 362 aa, Homo sapiens
MGTEATEQVSWGHYSGDEEDAYSAEPLPELCYKADVQAFSRAFQPSVSLTVAALGLAGNGLVLATHLAARRAARSPTSAHLLQLALADLLLALTLPFAAAGALQGWSLGSATCRTISGLYSASFHAGFLFLACISADRYVAIARALPAGPRPSTPGRAHLVSVIVWLLSLLLALPALLFSQDGQREGQRRCRLIFPEGLTQTVKGASAVAQVALGFALPLGVMVACYALLGRTLLAARGPERRRALRVVVALVAAFVVLQLPYSLALLLDTADLLAARERSCPASKRKDVALLVTSGLALARCGLNPVLYAFLGLRFRQDLRRLLRGGSCPSGPQPRRGCPRRPRLSSCSAPTETHSLSWDN

SEQ ID NO: 16647 - protein, 350 aa, Homo sapiens
MALEQNQSTDYYYEENEMNGTYDYSQYELICIKEDVREFAKVFLPVFLTIVFVIGLAGNSMVVAIYAYYKKQRTKTDVYILNLAVADLLLLFTLPFWAVNAVHGWVLGKIMCKITSALYTLNFVSGMQFLACISIDRYVAVTKVPSQSGVGKPCWIICFCVWMAAILLSIPQLVFYTVNDNARCIPIFPRYLGTSMKALIQMLEICIGFVVPFLIMGVCYFITARTLMKMPNIKISRPLKVLLTVVIVFIVTQLPYNIVKFCRAIDIIYSLITSCNMSKRMDIAIQVTESIALFHSCLNPILYVFMGASFKNYVMKVAKKYGSWRRQRQSVEEFPFDSEGPTEPTSTFSI

SEQ ID NO: 16648 - protein, 374 aa, Homo sapiens
MLSTSRSRFIRNTNESGEEVTTFFDYDYGAPCHKFDVKQIGAQLLPPLYSLVFIFGFVGNMLVVLILINCKKLKCLTDIYLLNLAISDLLFLITLPLWAHSAANEWVFGNAMCKLFTGLYHIGYFGGIFFIILLTIDRYLAIVHAVFALKARTVTFGVVTSVITWLVAVFASVPGIIFTKCQKEDSVYVCGPYFPRGWNNFHTIMRNILGLVLPLLIMVICYSGILKTLLRCRNEKKRHRAVRVIFTIMIVYFLFWTPYNIVILLNTFQEFFGLSNCESTSQLDQATQVTETLGMTHCCINPIIYAFVGEKFRSLFHIALGCRIAPLQKPVCGGPGVRPGKNVKVTTQGLLDGRGKGKSIGRAPEASLQDKEGA

SEQ ID NO: 16649 - protein, 355 aa, Homo sapiens
MTTSLDTVETFGTTSYYDDVGLLCEKADTRALMAQFVPPLYSLVFTVGLLGNVVVVMILIKYRRLRIMTNIYLLNLAISDLLFLVTLPFWIHYVRGHNWVFGHGMCKLLSGFYHTGLYSEIFFIILLTIDRYLAIVHAVFALRARTVTFGVITSIVTWGLAVLAALPEFIFYETEELFEETLCSALYPEDTVYSWRHFHTLRMTIFCLVLPLLVMAICYTGIIKTLLRCPSKKKYKAIRLIFVIMAVFFIFWTPYNVAILLSSYQSILFGNDCERSKHLDLVMLVTEVIAYSHCCMNPVIYAFVGERFRKYLRHFFHRHLLMHLGRYIPFLPSEKLERTSSVSPSTAEPELSIVF

SEQ ID NO: 16650 - protein, 360 aa, Homo sapiens
MNPTDIADTTLDESIYSNYYLYESIPKPCTKEGIKAFGELFLPPLYSLVFVFGLLGNSVVVLVLFKYKRLRSMTDVYLLNLAISDLLFVFSLPFWGYYAADQWVFGLGLCKMISWMYLVGFYSGIFFVMLMSIDRYLAIVHAVFSLRARTLTYGVITSLATWSVAVFASLPGFLFSTCYTERNHTYCKTKYSLNSTTWKVLSSLEINILGLVIPLGIMLFCYSMIIRTLQHCKNEKKNKAVKMIFAVVVLFLGFWTPYNIVLFLETLVELEVLQDCTFERYLDYAIQATETLAFVHCCLNPIIYFFLGEKFRKYILQLFKTCRGLFVLCQYCGLLQIYSADTPSSSYTQSTMDHDLHDAL

SEQ ID NO: 16651 - protein, 352 aa, Homo sapiens [sequence omitted]

SEQ ID NO: 16652 - protein, 374 aa, Homo sapiens
MSGESMNFSDVFDSSEDYFVSVNTSYYSVDSEMLLCSLQEVRQFSRLFVPIAYSLICVFGLLGNILVVITFAFYKKARSMTDVYLLNMAIADILFVLTLPFWAVSHATGAWVFSNATCKLLKGIYAINFNCGMLLLTCISMDRYIAIVQATKSFRLRSRTLPRSKIICLVVWGLSVIISSSTFVFNQKYNTQGSDVCEPKYQTVSEPIRWKLLMLGLELLFGFFIPLMFMIFCYTFIVKTLVQAQNSKRHKAIRVIIAVVLVFLACQIPHNMVLLVTAANLGKMNRSCQSEKLIGYTKTVTEVLAFLHCCLNPVLYAFIGQKFRNYFLKILKDLWCVRRKYKSSGFSCAGRYSENISRQTSETADNDNASSFTM

SEQ ID NO: 16653 - protein, 378 aa, Homo sapiens
MDLGKPMKSVLVVALLVIFQVCLCQDEVTDDYIGDNTTVDYTLFESLCSKKDVRNFKAWFLPIMYSIICFVGLLGNGLVVLTYIYFKRLKTMTDTYLLNLAVADILFLLTLPFWAYSAAKSWVFGVHFCKLIFAIYKMSFFSGMLLLLCISIDRYVAIVQAVSAHRHRARVLLISKLSCVGIWILATVLSIPELLYSDLQRSSSEQAMRCSLITEHVEAFITIQVAQMVIGFLVPLLAMSFCYLVIIRTLLQARNFERNKAIKVIIAVVVVFIVFQLPYNGVVLAQTVANFNITSSTCELSKQLNIAYDVTYSLACVRCCVNPFLYAFIGVKFRNDLFKLFKDLGCLSQEQLRQWSSCRHIRRSSMSVEAETTTTFSP

SEQ ID NO: 16654 - protein, 355 aa, Homo sapiens
MDYTLDLSVTTVTDYYYPDIFSSPCDAELIQTNGKLLLAVFYCLLFVFSLLGNSLVILVLVVCKKLRSITDVYLLNLALSDLLFVFSFPFQTYYLLDQWVFGTVMCKVVSGFYYIGFYSSMFFITLMSVDRYLAVVHAVYALKVRTIRMGTTLCLAVWLTAIMATIPLLVFYQVASEDGVLQCYSFYNQQTLKWKIFTNFKMNILGLLIPFTIFMFCYIKILHQLKRCQNHNKTKAIRLVLIVVIASLLFWVPFNVVLFLTSLHSMHILDGCSISQQLTYATHVTEIISFTHCCVNPVIYAFVGEKFKKHLSEIFQKSCSQIFNYLGRQMPRESCEKSSSCQQHSSRSSSVDYIL

SEQ ID NO: 16655 - protein, 369 aa, Homo sapiens
MTPTDFTSPIPNMADDYGSESTSSMEDYVNFNFTDFYCEKNNVRQFASHFLPPLYWLVFIVGALGNSLVILVYWYCTRVKTMTDMFLLNLAIADLLFLVTLPFWAIAAADQWKFQTFMCKVVNSMYKMNFYSCVLLIMCISVDRYIAIAQAMRAHTWREKRLLYSKMVCFTIWVLAAALCIPEILYSQIKEESGIAICTMVYPSDESTKLKSAVLTLKVILGFFLPFVVMACCYTIIIHTLIQAKKSSKHKALKVTITVLTVFVLSQFPYNCILLVQTIDAYAMFISNCAVSTNIDICFQVTQTIAFFHSCLNPVLYVFVGERFRRDLVKTLKNLGCISQAQWVSFTRREGSLKLSSMLLETTSGALSL

SEQ ID NO: 16656 - protein, 836 aa, Homo sapiens
MARLGNCSLTWAALIILLLPGSLEECGHISVSAPIVHLGDPITASCIIKQNCSHLDPEPQILWRLGAELQPGGRQQRLSDGTQESIITLPHLNHTQAFLSCCLNWGNSLQILDQVELRAGYPPAIPHNLSCLMNLTTSSLICQWEPGPETHLPTSFTLKSFKSRGNCQTQGDSILDCVPKDGQSHCCIPRKHLLLYQNMGIWVQAENALGTSMSPQLCLDPMDVVKLEPPMLRTMDPSPEAAPPQAGCLQLCWEPWQPGLHINQKCELRHKPQRGEASWALVGPLPLEALQYELCGLLPATAYTLQIRCIRWPLPGHWSDWSPSLELRTTERAPTVRLDTWWRQRQLDPRTVQLFWKPVPLEEDSGRIQGYVVSWRPSGQAGAILPLCNTTELSCTFHLPSEAQEVALVAYNSAGTSRPTPVVFSESRGPALTRLHAMARDPHSLWVGWEPPNPWPQGYVIEWGLGPPSASNSNKTWRMEQNGRATGFLLKENIRPFQLYEIIVTPLYQDTMGPSQHVYAYSQEMAPSHAPELHLKHIGKTWAQLEWVPEPPELGKSPLTHYTIFWTNAQNQSFSAILNASSRGFVLHGLEPASLYHIHLMAASQAGATNSTVLTLMTLTPEGSELHIILGLFGLLLLLTCLCGTAWLCCSPNRKNPLWPSVPDPAHSSLGSWVPTIMEEDAFQLPGLGTPPITKLTVLEEDEKKPVPWESHNSSETCGLPTLVQTYVLQGDPRAVSTQPQSQSGTSDQVLYGQLLGSPTSPGPGHYLRCDSTQPLLAGLTPSPKSYENLWFQASPLGTLVTPAPSQEDDCVFGPLLNFPLLQGIRVHGMEALGSF

SEQ ID NO: 16657 - protein, 972 aa, Homo sapiens; identical to SEQ ID NO: 3583

SEQ ID NO: 16658 - protein, 400 aa, Homo sapiens; identical to SEQ ID NO: 3592

SEQ ID NO: 16659 - protein, 976 aa, Homo sapiens [sequence omitted]

SEQ ID NO: 16660 - protein, 1097 aa, Homo sapiens; identical to SEQ ID NO: 7863

SEQ ID NO: 16661 - protein, 455 aa, Homo sapiens; identical to SEQ ID NO: 13598

SEQ ID NO: 16662 - protein, 461 aa, Homo sapiens; identical to SEQ ID NO: 13600

SEQ ID NO: 16663 - protein, 569 aa, Homo sapiens; identical to SEQ ID NO: 6965

SEQ ID NO: 16664 - protein, 551 aa, Homo sapiens; identical to SEQ ID NO: 7033

SEQ ID NO: 16665 - protein, 378 aa, Homo sapiens; identical to SEQ ID NO: 7079

SEQ ID NO: 16666 - protein, 825 aa, Homo sapiens; identical to SEQ ID NO: 7100

SEQ ID NO: 16667 - protein, 468 aa, Homo sapiens; identical to SEQ ID NO: 7128

SEQ ID NO: 16668 - protein, 459 aa, Homo sapiens [sequence omitted]

SEQ ID NO: 16669 - protein, 918 aa, Homo sapiens; identical to SEQ ID NO: 7133

SEQ ID NO: 16670 - protein, 369 aa, Homo sapiens
MLKPSLPFTSLLFLQLPLLGVGLNTTILTPNGNEDTTADFFLTTMPTDSLSVSTLPLPEVQCFVFNVEYMNCTWNSSSEPQPTNLTLHYWYKNSDNDKVQKCSHYLFSEEITSGCQLQKKEIHLYQTFVVQLQDPREPRRQATQMLKLQNLVIPWAPENLTLHKLSESQLELNWNNRFLNHCLEHLVQYRTDWDHSWTEQSVDYRHKFSLPSVDGQKRYTFRVRSRFNPLCGSAQHWSEWSHPIHWGSNTSKENPFLFALEAVVISVGSMGLIISLLCVYFWLERTMPRIPTLKNLEDLVTEYHGNFSAWSGVSKGLAESLQPDYSERLCLVSEIPPKGGALGEGPGASPCNQHSPYWAPPCYTLKPET

SEQ ID NO: 16671 - protein, 234 aa, Homo sapiens
MDPGLQQALNGMAPPGDTAMHVPAGSVASHLGTTSRSYFYLTTATLALCLVFTVATIMVLVVQRTDSIPNSPDNVPLKGGNCSEDLLCILKRAPFKKSWAYLQVAKHLNKTKLSWNKDGILHGVRYQDGNLVIQFPGLYFIICQLQFLVQCPNNSVDLKLELLINKHIKKQALVTVCESGMQTKHVYQNLSQFLLDYLQVNTTISVNVDTFQYIDTSTFPLENVLSIFLYSNSD

SEQ ID NO: 16672 - protein, 261 aa, Homo sapiens
MIETYNQTSPRSAATGLPISMKIFMYLLTVFLITQMIGSALFAVYLHRRLDKIEDERNLHEDFVFMKTIQRCNTGERSLSLLNCEEIKSQFEGFVKDIMLNKEETKKENSFEMQKGDQNPQIAAHVISEASSKTTSVLQWAEKGYYTMSNNLVTLENGKQLTVKRQGLYYIYAQVTFCSNREASSQAPFIASLCLKSPGRFERILLRAANTHSSAKPCGQQSIHLGGVFELQPGASVFVNVTDPSQVSHGTGFTSFGLLKL

SEQ ID NO: 16673 - protein, 281 aa, Homo sapiens; identical to SEQ ID NO: 16510

SEQ ID NO: 16674 - protein, 662 aa, Homo sapiens; identical to SEQ ID NO: 6872

SEQ ID NO: 16675 - protein, 427 aa, Homo sapiens; identical to SEQ ID NO: 6883

SEQ ID NO: 16676 - protein, 380 aa, Homo sapiens
MAFVCLAIGCLYTFLISTTFGCTSSSDTEIKVNPPQDFEIVDPGYLGYLYLQWQPPLSLDHFKECTVEYELKYRNIGSETWKTIITKNLHYKDGFDLNKGIEAKIHTLLPWQCTNGSEVQSSWAETTYWISPQGIPETKVQDMDCVYYNWQYLLCSWKPGIGVLLDTNYNLFYWYEGLDHALQCVDYIKADGQNIGCRFPYLEASDYKDFYICVNGSSENKPIRSSYFTFQLQNIVKPLPPVYLTFTRESSCEIKLKWSIPLGPIPARCFDYEIEIREDDTTLVTATVENETYTLKTTNETRQLCFVVRSKVNIYCSDDGIWSEWSDKQCWEGEDLSKKTLLRFWLPFGFILILVIFVTGLLLRKPNTYPKMIPEFFCDT

SEQ ID NO: 16677 - protein, 272 aa, Homo sapiens
MDSYLLMWGLLTFIMVPGCQAELCDDDPPEIPHATFKAMAYKEGTMLNCECKRGFRRIKSGSLYMLCTGNSSHSSWDNQCQCTSSATRNTTKQVTPQPEEQKERKTTEMQSPMQPVDQASLPGHCREPPPWENEATERIYHFVVGQMVYYQCVQGYRALHRGPAESVCKMTHGKTRWTQPQLICTGEMETSQFPGEEKPQASPEGRPESETSCLVTTTDFQIQTEMAATMETSIFTTEYQVAVAGCVFLLISVLLLSGLTWQRRQRKSRRTI

SEQ ID NO: 16678 - protein, 260 aa, Homo sapiens
MARPHPWWLCVLGTLVGLSATPAPKSCPERHYWAQGKLCCQMCEPGTFLVKDCDQHRKAAQCDPCIPGVSFSPDHHTRPHCESCRHCNSGLLVRNCTITANAECACRNGWQCRDKECTECDPLPNPSLTARSSQALSPHPQPTHLPYVSEMLEARTAGHMQTLADFRQLPARTLSTHWPPQRSLCSSDFIRILVIFSGMFLVFTLAGALFLHQRRKYRSNKGESPVEPAEPCHYSCPREEEGSTIPIQEDYRKPEPACSP

SEQ ID NO: 16679 - protein, 595 aa, Homo sapiens
MRVLLAALGLLFLGALRAFPQDRPFEDTCHGNPSHYYDKAVRRCCYRCPMGLFPTQQCPQRPTDCRKQCEPDYYLDEADRCTACVTCSRDDLVEKTPCAWNSSRVCECRPGMFCSTSAVNSCARCFFHSVCPAGMIVKFPGTAQKNTVCEPASPGVSPACASPENCKEPSSGTIPQAKPTPVSPATSSASTMPVRGGTRLAQEAASKLTRAPDSPSSVGRPSSDPGLSPTQPCPEGSGDCRKQCEPDYYLDEAGRCTACVSCSRDDLVEKTPCAWNSSRTCECRPGMICATSATNSCARCVPYPICAAETVTKPQDMAEKDTTFEAPPLGTQPDCNPTPENGEAPASTSPTQSLLVDSQASKTLPIPTSAPVALSSTGKPVLDAGPVLFWVILVLVVVVGSSAFLLCHRRACRKRIRQKLHLCYPVQTSQPKLELVDSRPRRSSTQLRSGASVTEPVAEERGLMSQPLMETCHSVGAAYLESLPLQDASPAGGPSSPRDLPEPRVSTEHTNNKIEKIYIMKADTVIVGTVKAELPEGRGLAGPAEPELEEELEADHTPHYPEQETEPPLGSCSDVMLSVEEEGKEDPLPTAASGK

SEQ ID NO: 16680 - protein, 458 aa, Homo sapiens; identical to SEQ ID NO: 2335

SEQ ID NO: 16681 - protein, 277 aa, Homo sapiens; identical to SEQ ID NO: 2338

SEQ ID NO: 16682 - protein, 193 aa, Homo sapiens
MPEEGSGCSVRRRPYGCVLRAALVPLVAGLVICLVVCIQRFAQAQQQLPLESLGWDVAELQLNHTGPQQDPRLYWQGGPALGRSFLHGPELDKGQLRIHRDGIYMVHIQVTLAICSSTTASRHHPTTLAVGICSPASRSISLLRLSFHQGCTIASQRLTPLARGDTLCTNLTGTLLPSRNTDETFFGVQWVRP

SEQ ID NO: 16683 - protein, 335 aa, Homo sapiens; identical to SEQ ID NO: 5111

SEQ ID NO: 16684 - protein, 400 aa, Homo sapiens; identical to SEQ ID NO: 3592

SEQ ID NO: 16685 - protein, 489 aa, Homo sapiens; identical to SEQ ID NO: 6750

SEQ ID NO: 16686 - protein, 398 aa, Homo sapiens; identical to SEQ ID NO: 6969

SEQ ID NO: 16687 - protein, 897 aa, Homo sapiens
MVLAQGLLSMALLALCWERSLAGAEETIPLQTLRCYNDYTSHITCRWADTQDAQRLVNVTLIRRVNEDLLEPVSCDLSDDMPWSACPHPRCVPRRCVIPCQSFVVTDVDYFSFQPDRPLGTRLTVTLTQHVQPPEPRDLQISTDQDHFLLTWSVALGSPQSHWLSPGDLEFEVVYKRLQDSWEDAAILLSNTSQATLGPEHLMPSSTYVARVRTRLAPGSRLSGRPSKWSPEVCWDSQPGDEAQPQNLECFFDGAAVLSCSWEVRKEVASSVSFGLFYKPSPDAGEEECSPVLREGLGSLHTRHHCQIPVPDPATHGQYIVSVQPRRAEKHIKSSVNIQMAPPSLNVTKDGDSYSLRWETMKMRYEHIDHTFEIQYRKDTATWKDSKTETLQNAHSMALPALEPSTRYWARVRVRTSRTGYNGIWSEWSEARSWDTESVLPMWVLALIVIFLTIAVLLALRFCGIYGYRLRRKWEEKIPNPSKSHLFQNGSAELWPPGSMSAFTSGSPPHQGPWGSRFPELEGVFPVGFGDSEVSPLTIEDPKHVCDPPSGPDTTPAASDLPTEQPPSPQPGPPAASHTPEKQASSFDFNGPYLGPPHSRSLPDILGQPEPPQEGGSQKSPPPGSLEYLCLPAGGQVQLVPLAQAMGPGQAVEVERRPSQGAAGSPSLESGGGPAPPALGPRVGGQDQKDSPVAIPMSSGDTEDPGVASGYVSSADLVFTPNSGASSVSLVPSLGLPSDQTPSLCPGLASGPPGAPGPVKSGFEGYVELPPIEGRSPRSPRNNPVPPEAKSPVLNPGERPADVSPTSPQPEGLLVLQQVGDYCFLPGLGPGPLSLRSKPSSPGPGPEIKNLDQAFQVKKPPGQAVPQVPVIQLFKALKQQDYLSLPPWEVNKPGEVC

SEQ ID NO: 16688 - protein, 897 aa, Homo sapiens; identical to SEQ ID NO: 16687

SEQ ID NO: 16689 - protein, 255 aa, Homo sapiens; identical to SEQ ID NO: 14706

SEQ ID NO: 16690 - protein, 578 aa, Homo sapiens
MLPCLVVLLAALLSLRLGSDAHGTELPSPPSVWFEAEFFHHILHWTPIPNQSESTCYEVALLRYGIESWNSISNCSQTLSYDLTAVTLDLYHSNGYRARVRAVDGSRHSNWTVTNTRFSVDEVTLTVGSVNLEIHNGFILGKIQLPRPKMAPANDTYESIFSHFREYEIAIRKVPGNFTFTHKKVKHENFSLLTSGEVGEFCVQVKPSVASRSNKGMWSKEECISLTRQYFTVTNVIIFFAFVLLLSGALAYCLALQLYVRRRKKLPSVLLFKKPSPFIFISQRPSPETQDTIHPLDEEAFLKVSPELKNLDLHGSTDSGFGSTKPSLQTEEPQFLLPDPHPQADRTLGNREPPVLGDSCSSGSSNSTDSGICLQEPSLSPSTGPTWEQQVGSNSRGQDDSGIDLVQNSEGRAGDTQGGSALGHHSPPEPEVPGEEDPAAVAFQGYLRQTRCAEEKATKTGCLEEESPLTDGLGPKFGRCLVDEAGLHPPALAKGYLKQDPLEMTLASSGAPTGQWNQPTEEWSLLALSSCSDLGISDWSFAHDLAPLGCVAAPGGLLGSFNSDLVTLPLISSLQSSE

SEQ ID NO: 16691 - protein, 866 aa, Homo sapiens; identical to SEQ ID NO: 6909

SEQ ID NO: 16692 - protein, 397 aa, Homo sapiens; identical to SEQ ID NO: 3788

SEQ ID NO: 16693 - protein, 355 aa, Homo sapiens
MDQFPESVTENFEYDDLAEACYIGDIVVFGTVFLSIFYSVIFAIGLVGNLLVVFALTNSKKPKSVTDIYLLNLALSDLLFVATLPFWTHYLINEKGLHNAMCKFTTAFFFIGFFGSIFFITVISIDRYLAIVLAANSMNNRTVQHGVTISLGVWAAAILVAAPQFMFTKQKENECLGDYPEVLQEIWPVLRNVETNFLGFLLPLLIMSYCYFRIIQTLFSCKNHKKAKAIKLILLVVIVFFLFWTPYNVMIFLETLKLYDFFPSCDMRKDLRLALSVTETVAFSHCCLNPLIYAFAGEKFRRYLYHLYGKCLAVLCGRSVHVDFSSSESQRSRHGSVLSSNFTYHTSDGDALLLL

SEQ ID NO: 16694 - protein, 107 aa, Homo sapiens; identical to SEQ ID NO: 3796

SEQ ID NO: 16695 - protein, 98 aa, Homo sapiens; identical to SEQ ID NO: 3797

SEQ ID NO: 16696 - protein, 94 aa, Homo sapiens; identical to SEQ ID NO: 3798

SEQ ID NO: 16697 - protein, 93 aa, Homo sapiens; identical to SEQ ID NO: 3802

SEQ ID NO: 16698 - protein, 109 aa, Homo sapiens; identical to SEQ ID NO: 3806

SEQ ID NO: 16699 - protein, 111 aa, Homo sapiens; identical to SEQ ID NO: 3808

SEQ ID NO: 16700 - protein, 254 aa, Homo sapiens
MGRDLRPGSRVLLLLLLLLLVYLTQPGNGNEGSVTGSCYCGKRISSDSPPSVQFMNRLRKHLRAYHRCLYYTRFQLLSWSVCGGNKDPWVQELMSCLDLKECGHAYSGIVAHQKHLLPTSPPISQASEGASSDIHTPAQMLLSTLQSTQRPTLPVGSLSSDKELTRPNETTIHTAGHSLAAGPEAGENQKQPEKNAGPTARTSATVPVLCLLAIIFILTAALSYVLCKRRRGQSPQSSPDLPVHYIPVAPDSNT

SEQ ID NO: 16701 - protein, 107 aa, Homo sapiens; identical to SEQ ID NO: 3811

SEQ ID NO: 16702 - protein, 107 aa, Homo sapiens; identical to SEQ ID NO: 3812

SEQ ID NO: 16703 - protein, 101 aa, Homo sapiens; identical to SEQ ID NO: 10263

SEQ ID NO: 16704 - protein, 114 aa, Homo sapiens; identical to SEQ ID NO: 3813

SEQ ID NO: 16705 - protein, 114 aa, Homo sapiens; identical to SEQ ID NO: 3815

SEQ ID NO: 16706 - protein, 128 aa, Homo sapiens; identical to SEQ ID NO: 10676

SEQ ID NO: 16707 - protein, 99 aa, Homo sapiens; identical to SEQ ID NO: 3817

SEQ ID NO: 16708 - protein, 125 aa, Homo sapiens; identical to SEQ ID NO: 3818

SEQ ID NO: 16709 - protein, 350 aa, Homo sapiens
MSNITDPQMWDFDDLNFTGMPPADEDYSPCMLETETLNKYVVIIAYALVFLLSLLGNSLVMLVILYSRVGRSVTDVYLLNLALADLLFALTLPIWAASKVNGWIFGTFLCKVVSLLKEVNFYSGILLLACISVDRYLAIVHATRTLTQKRHLVKFVCLGCWGLSMNLSLPFFLFRQAYHPNNSSPVCYEVLGNDTAKWRMVLRILPHTFGFIVPLFVMLFCYGFTLRTLFKAHMGQKHRAMRVIFAVVLIFLLCWLPYNLVLLADTLMRTQVIQESCERRNNIGRALDATEILGFLHSCLNPIIYAFIGQNFRHGFLKILAMHGLVSKEFLARHRVTSYTSSSVNVSSNL

SEQ ID NO: 16710 - protein, 360 aa, Homo sapiens
MEDFNMESDSFEDFWKGEDLSNYSYSSTLPPFLLDAAPCEPESLEINKYFVVIIYALVFLLSLLGNSLVMLVILYSRVGRSVTDVYLLNLALADLLFALTLPIWAASKVNGWIFGTFLCKVVSLLKEVNFYSGILLLACISVDRYLAIVHATRTLTQKRYLVKFICLSIWGLSLLLALPVLLFRRTVYSSNVSPACYEDMGNNTANWRMLLRILPQSFGFIVPLLIMLFCYGFTLRTLFKAHMGQKHRAMRVIFAVVLIFLLCWLPYNLVLLADTLMRTQVIQETCERRNHIDRALDATEILGILHSCLNPLIYAFIGQKFRHGLLKILAIHGLISKDSLPKDSRPSFVGSSSGHTSTTL

SEQ ID NO: 16711 - protein, 368 aa, Homo sapiens
MVLEVSDHQVLNDAEVAALLENFSSSYDYGENESDSCCTSPPCPQDFSLNFDRAFLPALYSLLFLLGLLGNGAVAAVLLSRRTALSSTDTFLLHLAVADTLLVLTLPLWAVDAAVQWVFGSGLCKVAGALFNINFYAGALLLACISFDRYLNIVHATQLYRRGPPARVTLTCLAVWGLCLLFALPDFIFLSAHHDERLNATHCQYNFPQVGRTALRVLQLVAGFLLPLLVMAYCYAHILAVLLVSRGQRRLRAMRLVVVVVVAFALCWTPYHLVVLVDILMDLGALARNCGRESRVDVAKSVTSGLGYMHCCLNPLLYAFVGVKFRERMWMLLLRLGCPNQRGLQRQPSSSRRDSSWSETSEASYSGL

SEQ ID NO: 16712 - protein, 352 aa, Homo sapiens
MEGISIYTSDNYTEEMGSGDYDSMKEPCFREENANFNKIFLPTIYSIIFLTGIVGNGLVILVMGYQKKLRSMTDKYRLHLSVADLLFVITLPFWAVDAVANWYFGNFLCKAVHVIYTVNLYSSVLILAFISLDRYLAIVHATNSQRPRKLLAEKVVYVGVWIPALLLTIPDFIFANVSEADDRYICDRFYPNDLWVVVFQFQHIMVGLILPGIVILSCYCIIISKLSHSKGHQKRKALKTTVILILAFFACWLPYYIGISIDSFILLEIIKQGCEFENTVHKWISITEALAFFHCCLNPILYAFLGAKFKTSAQHALTSVSRGSSLKILSKGKRGGHSSVSTESESSSFHSS

SEQ ID NO: 16713 - protein, 372 aa, Homo sapiens
MNYPLTLEMDLENLEDLFWELDRLDNYNDTSLVENHLCPATEGPLMASFKAVFVPVAYSLIFLLGVIGNVLVLVILERHRQTRSSTETFLFHLAVADLLLVFILPFAVAEGSVGWVLGTFLCKTVIALHKVNFYCSSLLLACIAVDRYLAIVHAVHAYRHRRLLSIHITCGTIWLVGFLLALPEILFAKVSQGHHNNSLPRCTFSQENQAETHAWFTSRFLYHVAGFLLPMLVMGWCYVGVVHRLRQAQRRPQRQKAVRVAILVTSIFFLCWSPYHIVIFLDTLARLKAVDNTCKLNGSLPVAITMCEFLGLAHCCLNPMLYTFAGVKFRSDLSRLLTKLGCTGPASLCQLFPSWRRSSLSESENATSLTTF

SEQ ID NO: 16714 - protein, 342 aa, Homo sapiens
MAEHDYHEDYGFSSFNDSSQEEHQDFLQFSKVFLPCMYLVVFVCGLVGNSLVLVISIFYHKLQSLTDVFLVNLPLADLVFVCTLPFWAYAGIHEWVFGQVMCKSLLGIYTINFYTSMLILTCITVDRFIVVVKATKAYNQQAKRMTWGKVTSLLIWVISLLVSLPQIIYGNVFNLDKLICGYHDEAISTVVLATQMTLGFFLPLLTMIVCYSVIIKTLLHAGGFQKHRSLKIIFLVMAVFLLTQMPFNLMKFIRSTHWEYYAMTSFHYTIMVTEAIAYLRACLNPVLYAFVSLKFRKNFWKLVKDIGCLPYLGVSHQWKSSEDNSKTFSASHNVEATSMFQL

SEQ ID NO: 16715 - protein, 362 aa, Homo sapiens
MDLHLFDYSEPGNFSDISWPCNSSDCIVVDTVMCPNMPNKSVLLYTLSFIYIFIFVIGMIANSVVVWVNIQAKTTGYDTHCYILNLAIADLWVVLTIPVWVVSLVQHNQWPMGELTCKVTHLIFSINLFGSIFFLTCMSVDRYLSITYFTNTPSSRKKMVRRVVCILVWLLAFCVSLPDTYYLKTVTSASNNETYCRSFYPEHSIKEWLIGMELVSVVLGFAVPFSIIAVFYFLLARAISASSDQEKHSSRKIIFSYVVVFLVCWLPYHVAVLLDIFSILHYIPFTCRLEHALFTALHVTQCLSLVHCCVNPVLYSFINRNYRYELMKAFIFKYSAKTGLTKLIDASRVSETEYSALEQSTK

SEQ ID NO: 16716 - protein, 336 aa, Homo sapiens
MGNCLHRAELSPSTENSSQLDFEDVWNSSYGVNDSFPDGDYGANLEAAAPCHSCNLLDDSALPFFILTSVLGILASSTVLFMLFRPLFRWQLCPGWPVLAQLAVGSALFSIVVPVLAPGLGSTRSSALCSLGYCVWYGSAFAQALLLGCHASLGHRLGAGQVPGLTLGLTVGIWGVAALLTLPVTLASGASGGLCTLIYSTELKALQATHTVACLAIFVLLPLGLFGAKGLKKALGMGPGPWMNILWAWFIFWWPHGVVLGLDFLVRSKLLLLSTCLAQQALDLLLNLAEALAILHCVATPLLLALFCHQATRTLLPSLPLPEGWSSHLDTLGSKS

SEQ ID NO: 16717 - protein, 193 aa, Homo sapiens; identical to SEQ ID NO: 4836

SEQ ID NO: 16718 - protein, 508 aa, Homo sapiens
MDHLGASLWPQVGSLCLLLAGAAWAPPPNLPDPKFESKAALLAARGPEELLCFTERLEDLVCFWEEAASAGVGPGNYSFSYQLEDEPWKLCRLHQAPTARGAVRFWCSLPTADTSSFVPLELRVTAASGAPRYHRVIHINEVVLLDAPVGLVARLADESGHVVLRWLPPPETPMTSHIRYEVDVSAGNGAGSVQRVEILEGRTECVLSNLRGRTRYTFAVRARMAEPSFGGFWSAWSEPVSLLTPSDLDPLILTLSLILVVILVLLTVLALLSHRRALKQKIWPGIPSPESEFEGLFTTHKGNFQLWLYQNDGCLWWSPCTPFTEDPPASLEVLSERCWGTMQAVEPGTDDEGPLLEPVGSEHAQDTYLVLDKWLLPRNPPSEDLPGPGGSVDIVAMDEGSEASSCSSALASKPSPEGASAASFEYTILDPSSQLLRPWTLCPELPPTPPHLKYLYLVVSDSGISTDYSSGDSQGAQGGLSDGPYSNPYENSLIPAAEPLPPSYVACS

SEQ ID NO: 16719 - protein, 993 aa, Homo sapiens
MPALARDGGQLPLLVVFSAMIFGTITNQDLPVIKCVLINHKNNDSSVGKSSSYPMVSESPEDLGCALRPQSSGTVYEAAAVEVDVSASITLQVLVDAPGNISCLWVFKHSSLNCQPHFDLQNRGVVSMVILKMTETQAGEYLLFIQSEATNYTILFTVSIRNTLLYTLRRPYFRKMENQDALVCISESVPEPIVEWVLCDSQGESCKEESPAVVKKEEKVLHELFGTDIRCCARNELGRECTRLFTIDLNQTPQTTLPQLFLKVGEPLWIRCKAVHVNHGFGLTWELENKALEEGNYFEMSTYSTNRTMIRILFAFVSSVARNDTGYYTCSSSKHPSQSALVTIVEKGFINATNSSEDYEIDQYEEFCFSVRFKAYPQIRCTWTFSRKSFPCEQKGLDNGYSISKFCNHKHQPGEYIFHAENDDAQFTKMFTLNIRRKPQVLAEASASQASCFSDGYPLPSWTWKKCSDKSPNCTEEITEGVWNRKANRKVFGQWVSSSTLNMSEAIKGFLVKCCAYNSLGTSCETILLNSPGPFPFIQDNISFYATIGVCLLFIVVLTLLICHKYKKQFRYESQLQMVQVTGSSDNEYFYVDFREYEYDLKWEFPRENLEFGKVLGSGAFGKVMNATAYGISKTGVSIQVAVKMLKEKADSSEREALMSELKMMTQLGSHENIVNLLGACTLSGPIYLIFEYCCYGDLLNYLRSKREKFHRTWTEIFKEHNFSFYPTFQSHPNSSMPGSREVQIHPDSDQISGLHGNSFHSEDEIEYENQKRLEEEEDLNVLTFEDLLCFAYQVAKGMEFLEFKSCVHRDLAARNVLVTHGKVVKICDFGLARDIMSDSNYVVRGNARLPVKWMAPESLFEGIYTIKSDVWSYGILLWEIFSLGVNPYPGIPVDANFYKLIQNGFKMDQPFYATEEIYIIMQSCWAFDSRKRPSFPNLTSFLGCQLADAEEAMYQNVDGRVSECPHTYQNRRPFSREMDLGLLSPQAQVEDS

SEQ ID NO: 16720 - protein, 235 aa, Homo sapiens
MTVLAPAWSPTTYLLLLLLLSSGLSGTQDCSFQHSPISSDFAVKIRELSDYLLQDYPVTVASNLQDEELCGGLWRLVLAQRWMERLKTVAGSKMQGLLERVNTEIHFVTKCAFQPPPSCLRFVQTNISRLLQETSEQLVALKPWITRQNFSRCLELQCQPDSSTLPPPWSPRPLEATAPTAPQPPLLLLLLLPVGLLLLAAAWCLHWQRTRRRTPRPGEQVPPVPSPQDLLLVEH

SEQ ID NO: 16721 - protein, 836 aa, Homo sapiens; identical to SEQ ID NO: 16656

SEQ ID NO: 16722 - protein, 241 aa, Homo sapiens; identical to SEQ ID NO: 13588

SEQ ID NO: 16723 - protein, 199 aa, Homo sapiens; identical to SEQ ID NO: 14709

SEQ ID NO: 16724 - protein, 897 aa, Homo sapiens; identical to SEQ ID NO: 16687

SEQ ID NO: 16725 - protein, 918 aa, Homo sapiens; identical to SEQ ID NO: 7133

SEQ ID NO: 16726 - protein, 283 aa, Homo sapiens; identical to SEQ ID NO: 13583

SEQ ID NO: 16727 - protein, 166 aa, Homo sapiens; identical to SEQ ID NO: 6747

SEQ ID NO: 16728 - protein, 337 aa, Homo sapiens
MRPTLLWSLLLLLGVFAAAAAAPPDPLSQLPAPQHPKIRLYNAEQVLSWEPVALSNSTRPVVYQVQFKYTDSKWFTADIMSIGVNCTQITATECDFTAASPSAGFPMDFNVTLRLRAELGALHSAWVTMPWFQHYRNVTVGPPENIEVTPGEGSLIIRFSSPFDIADTSTAFFCYYVHYWEKGGIQQVKGPFRSNSISLDNLKPSRVYCLQVQAQLLWNKSNIFRVGHLSNISCYETMADASTELQQVILISVGTFSLLSVLAGACFFLVLKYRGLIKYWFHTPPSIPLQIEEYLKDPTQPILEALDKDSSPKDDVWDSVSIISFPEKEQEDVLQTL

SEQ ID NO: 16729 - protein, 189 aa, Homo sapiens; identical to SEQ ID NO: 6728

SEQ ID NO: 16730 - protein, 187 aa, Homo sapiens; identical to SEQ ID NO: 6745

SEQ ID NO: 16731 - protein, 271 aa, Homo sapiens
MAKVPDMFEDLKNCYSENEEDSSSIDHLSLNQKSFYHVSYGPLHEGCMDQSVSLSISETSKTSKLTFKESMVVVATNGKVLKKRRLSLSQSITDDDLEAIANDSEEEIIKPRSAPFSFLSNVKYNFMRIIKYEFILNDALNQSIIRANDQYLTAAALHNLDEAVKFDMGAYKSSKDDAKITVILRISKTQLYVTAQDEDQPVLLKEMPEIPKTITGSETNLLFFWETHGTKNYFTSVAHPNLFIATKQDYWVCLAGGPPSITDFQILENQA

SEQ ID NO: 16732 - protein, 178 aa, Homo sapiens; identical to SEQ ID NO: 6851

SEQ ID NO: 16733 - protein, 578 aa, Homo sapiens; identical to SEQ ID NO: 16690

SEQ ID NO: 16734 - protein, 199 aa, Homo sapiens; identical to SEQ ID NO: 6853

SEQ ID NO: 16735 - protein, 422 aa, Homo sapiens; identical to SEQ ID NO: 6861

SEQ ID NO: 16736 - protein, 219 aa, Homo sapiens
MCPARSLLLVATLVLLDHLSLARNLPVATPDPGMFPCLHHSQNLLRAVSNMLQKARQTLEFYPCTSEEIDHEDITKDKTSTVEACLPLELTKNESCLNSRETSFITNGSCLASRKTSFMMALCLSSIYEDLKMYQVEFKTMNAKLLMDPKRQIFLDQNMLAVIDELMQALNFNSETVPQKSSLEEPDFYKTKIKLCILLHAFRIRAVTIDRVMSYLNAS

SEQ ID NO: 16737 - protein, 146 aa, Homo sapiens [sequence omitted]

SEQ ID NO: 16738 - protein, 427 aa, Homo sapiens; identical to SEQ ID NO: 6883

SEQ ID NO: 16739 - protein, 546 aa, Homo sapiens
MKNQDKKNGAAKQSNPKSSPGQPEAGPEGAQERPSQAAPAVEAEGPGSSQAPRKPEGAQARTAQSGALRDVSEELSRQLEDILSTYCVDNNQGGPGEDGAQGEPAEPEDAEKSRTYVARNGEPEPTPVVNGEKEPSKGDPNTEEIRQSDEVGDRDHRRPQEKKKAKGLGKEITLLMQTLNTLSTPEEKLAALCKKYAELLEEHRNSQKQMKLLQKKQSQLVQEKDHLRGEHSKAVLARSKLESLCRELQRHNRSLKEEGVQRAREEEEKRKEVTSHFQVTLNDIQLQMEQHNERNSKLRQENMELAERLKKLIEQYELREEHIDKVFKHKDLQQQLVDAKLQQAQEMLKEAEERHQREKDFLLKEAVESQRMCELMKQQETHLKQQLALYTEKFEEFQNTLSKSSEVFTTFKQEMEKMTKKIKKLEKETTMYRSRWESSNKALLEMAEEKTVRDKELEGLQVKIQRLEKLCRALQTERNDLNKRVQDLSAGGQGSLTDSGPERRPEGPGAQAPSSPRVTEAPCYPGAPSTEASGQTGPQEPTSARA

SEQ ID NO: 16740 - protein, 162 aa, Homo sapiens
MRISKPHLRSISIQCYLCLLLNSHFLTEAGIHVFILGCFSAGLPKTEANWVNVISDLKKIEDLIQSMHIDATLYTESDVHPSCKVTAMKCFLLELQVISLESGDASIHDTVENLIILANNSLSSNGNVTESGCKECEELEEKNIKEFLQSFVHIVQMFINTS

SEQ ID NO: 16741 - protein, 267 aa, Homo sapiens; identical to SEQ ID NO: 6894

SEQ ID NO: 16742 - protein, 1332 aa, Homo sapiens
MESHSRAGKSRKSAKFRSISRSLMLCNAKTSDDGSSPDEKYPDPFEISLAQGKEGIFHSSVQLADTSEAGPSSVPDLALASEAAQLQAAGNDRGKTCRRIFFMKESSTASSREKPGKLEAQSSNFLFPKACHQRARSNSTSVNPYCTREIDFPMTKKSAAPTDRQPYSLCSNRKSLSQQLDCPAGKAAGTSRPTRSLSTAQLVQPSGGLQASVISNIVLMKGQAKGLGFSIVGGKDSIYGPIGIYVKTIFAGGAAAADGRLQEGDEILELNGESMAGLTHQDALQKFKQAKKGLLTLTVRTRLTAPPSLCSHLSPPLCRSLSSSTCITKDSSSFALESPSAPISTAKPNYRIMVEVSLQKEAGVGLGIGLCSVPYFQCISGIFVHTLSPGSVAHLDGRLRCGDEIVEISDSPVHCLTLNEVYTILSHCDPGPVPIIVSRHPDPQVSEQQLKEAVAQAVENTKFGKERHQWSLEGVKRLESSWHGRPTLEKEREKNSAPPHRRAQKVMIRSSSDSSYMSGSPGGSPGSGSAEKPSSDVDISTHSPSLPLAREPVVLSIASSRLPQESPPLPESRDSHPPLRLKKSFEILVRKPMSSKPKPPPRKYFKSDSDPQKSLEERENSSCSSGHTPPTCGQEARELLPLLLPQEDTAGRSPSASAGCPGPGIGPQTKSSTEGEPGWRRASPVTQTSPIKHPLLKRQARMDYSFDTTAEDPWVRISDCIKNLFSPIMSENHGHMPLQPNASLNEEEGTQGHPDGTPPKLDTANGTPKVYKSADSSTVKKGPPVAPKPAWFRQSLKGLRNRASDPRGLPDPALSTQPAPASREHLGSHIRASSSSSSIRQRISSFETFGSSQLPDKGAQRLSLQPSSGEAAKPLGKHEEGRFSGLLGRGAAPTLVPQQPEQVLSSGSPAASEARDPGVSESPPPGRQPNQKTLPPGPDPLLRLLSTQAEESQGPVLKMPSQRARSFPLTRSQSCETKLLDEKTSKLYSISSQVSSAVMKSLLCLPSSISCAQTPCIPKEGASPTSSSNEDSAANGSAETSALDTGFSLNLSELREYTEGLTEAKEDDDGDHSSLQSGQSVISLLSSEELKKLIEEVKVLDEATLKQLDGIHVTILHKEEGAGLGFSLAGGADLENKVITVHRVFPNGLASQEGTIQKGNEVLSINGKSLKGTTHHDALAILRQAREPRQAVIVTRKLTPEAMPDLNSSTDSAASASAASDVSVESTAEATVCTVTLEKMSAGLGFSLEGGKGSLHGDKPLTINRIFKGAASEQSETVQPGDEILQLGGTAMQGLTRFEAWNIIKALPDGPVTIVIRRKSLQSKETTAAGDS

SEQ ID NO: 16743 - protein, 155 aa, Homo sapiens; identical to SEQ ID NO: 6902

SEQ ID NO: 16744 - protein, 866 aa, Homo sapiens; identical to SEQ ID NO: 6909

SEQ ID NO: 16745 - protein, 193 aa, Homo sapiens
MAAEPVEDNCINFVAMKFIDNTLYFIAEDDENLESDYFGKLESKLSVIRNLNDQVLFIDQGNRPLFEDMTDSDCRDNAPRTIFIISMYKDSQPRGMAVTISVKCEKISTLSCENKIISFKEMNPPDNIKDTKSDIIFFQRSVPGHDNKMQFESSSYEGYFLACEKERDLFKLILKKEDELGDRSIMFTVQNED

SEQ ID NO: 16746 - protein, 569 aa, Homo sapiens; identical to SEQ ID NO: 6965

SEQ ID NO: 16747 - protein, 271 aa, Homo sapiens; identical to SEQ ID NO: 16731

SEQ ID NO: 16748 - protein, 269 aa, Homo sapiens
MAEVPELASEMMAYYSGNEDDLFFEADGPKQMKCSFQDLDLCPLDGGIQLRISDHHYSKGFRQAASVVVAMDKLRKMLVPCPQTFQENDLSTFFPFIFEEEPIFFDTWDNEAYVHDAPVRSLNCTLRDSQQKSLVMSGPYELKALHLQGQDMEQQVVFSMSFVQGEESNDKIPVALGLKEKNLYLSCVLKDDKPTLQLESVDPKNYPKKKMEKRFVFNKIEINNKLEFESAQFPNWYISTSQAENMPVFLGGTKGGQDITDFTMQFVSS

SEQ ID NO: 16749 - protein, 153 aa, Homo sapiens; identical to SEQ ID NO: 7000

SEQ ID NO: 16750 - protein, 176 aa, Homo sapiens; identical to SEQ ID NO: 7001

SEQ ID NO: 16751 - protein, 553 aa, Homo sapiens; identical to SEQ ID NO: 7007

SEQ ID NO: 16752 - protein, 311 aa, Homo sapiens
MQTFTMVLEEIWTSLFMWFFYALIPCLLTDEVAILPAPQNLSVLSTNMKHLLMWSPVIAPGETVYYSVEYQGEYESLYTSHIWIPSSWCSLTEGPECDVTDDITATVPYNLRVRATLGSQTSAWSILKHPFNRNSTILTRPGMEITKDGFHLVIELEDLGPQFEFLVAYWRREPGAEEHVKMVRSGGIPVHLETMEPGAAYCVKAQTFVKAIGRYSAFSQTECVEVQGEAIPLVLALFAFVGFMLILVVVPLFVWKMGRLLQYSCCPVVVLPDTLKITNSPQKLISCRREEVDACATAVMSPEELLRAWIS

SEQ ID NO: 16753 - protein, 155 aa, Homo sapiens
MERIVICLMVIFLGTLVHKSSSQGQDRHMIRMRQLIDIVDQLKNYVNDLVPEFLPAPEDVETNCEWSAFSCFQKAQLKSANTGNNERIINVSIKKLKRKPPSTNAGRRQKHRLTCPSCDSYEKKPPKEFLERFKSLLQKMIHQHLSSRTHGSEDS

SEQ ID NO: 16754 - protein, 152 aa, Homo sapiens; identical to SEQ ID NO: 7035

SEQ ID NO: 16755 - protein, 229 aa, Homo sapiens; identical to SEQ ID NO: 4494

SEQ ID NO: 16756 - protein, 153 aa, Homo sapiens [sequence omitted]

SEQ ID NO: 16757 - protein, 825 aa, Homo sapiens; identical to SEQ ID NO: 7100

SEQ ID NO: 16758 - protein, 134 aa, Homo sapiens; identical to SEQ ID NO: 7108

SEQ ID NO: 16759 - protein, 420 aa, Homo sapiens; identical to SEQ ID NO: 7111

SEQ ID NO: 16760 - protein, 212 aa, Homo sapiens; identical to SEQ ID NO: 7123

SEQ ID NO: 16761 - protein, 468 aa, Homo sapiens; identical to SEQ ID NO: 7128

SEQ ID NO: 16762 - protein, 177 aa, Homo sapiens; identical to SEQ ID NO: 7144

SEQ ID NO: 16763 - protein, 521 aa, Homo sapiens
MGLGRCIWEGWTLESEALRRDMGTWLLACICICTCVCLGVSVTGEGQGPRSRTFTCLTNNILRIDCHWSAPELGQGSSPWLLFTSNQAPGGTHKCILRGSECTVVLPPEAVLVPSDNFTITFHHCMSGREQVSLVDPEYLPRRHVKLDPPSDLQSNISSGHCILTWSISPALEPMTTLLSYELAFKKQEEAWEQAQHRDHIVGVTWLILEAFELDPGFIHEARLRVQMATLEDDVVEEERYTGQWSEWSQPVCFQAPQRQGPLIPPWGWPGNTLVAVSIFLLLTGPTYLLFKLSPRVKRIFYQNVPSPAMFFQPLYSVHNGNFQTWMGAHGAGVLLSQDCAGTPQGALEPCVQEATALLTCGPARPWKSVALEEEQEGPGTRLPGNLSSEDVLPAGCTEWRVQTLAYLPQEDWAPTSLTRPAPPDSEGSRSSSSSSSSNNNNYCALGCYGGWHLSALPGNTQSSGPIPALACGLSCDHQGLETQQGVAWVLAGHCQRPGLHEDLQGMLLPSVLSKARSWTF

SEQ ID NO: 16764 - protein, 202 aa, Homo sapiens; identical to SEQ ID NO: 7859

SEQ ID NO: 16765 - protein, 1097 aa, Homo sapiens; identical to SEQ ID NO: 7863

SEQ ID NO: 16766 - protein, 240 aa, Homo sapiens
MEESVVRPSVFVVDGQTDIPFTRLGRSHRRQSCSVARVGLGLLLLLMGAGLAVQGWFLLQLHWRLGEMVTRLPDGPAGSWEQLIQERRSHEVNPAAHLTGANSSLTGSGGPLLWETQLGLAFLRGLSYHDGALVVTKAGYYYIYSKVQLGGVGCPLGLASTITHGLYKRTPRYPEELELLVSQQSPCGRATSSSRVWWDSSFLGGVVHLEAGEKVVVRVLDERLVRLRDGTRSYFGAFMV

SEQ ID NO: 16767 - protein, 435 aa, Homo sapiens; identical to SEQ ID NO: 8146

SEQ ID NO: 16768 - protein, 244 aa, Homo sapiens
MGALGLEGRGGRLQGRGSLLLAVAGATSLVTLLLAVPITVLAVLALVPQDQGGLVTETADPGAQAQQGLGFQKLPEEEPETDLSPGLPAAHLIGAPLKGQGLGWETTKEQAFLTSGTQFSDAEGLALPQDGLYYLYCLVGYRGRAPPGGGDPQGRSVTLRSSLYRAGGAYGPGTPELLLEGAETVTPVLDPARRQGYGPLWYTSVGFGGLVQLRRGERVYVNISHPDMVDFARGKTFFGAVMVG

SEQ ID NO: 16769 - protein, 554 aa, Homo sapiens; identical to SEQ ID NO: 3578

SEQ ID NO: 16770 - protein, 401 aa, Homo sapiens; identical to SEQ ID NO: 13572

SEQ ID NO: 16771 - protein, 252 aa, Homo sapiens; identical to SEQ ID NO: 9860

SEQ ID NO: 16772 - protein, 979 aa, Homo sapiens; identical to SEQ ID NO: 9862

SEQ ID NO: 16773 - protein, 277 aa, Homo sapiens
MCVGARRLGRGPCAALLLLGLGLSTVTGLHCVGDTYPSNDRCCHECRPGNGMVSRCSRSQNTVCRPCGPGFYNDVVSSKPCKPCTWCNLRSGSERKQLCTATQDTVCRCRAGTQPLDSYKPGVDCAPCPPGHFSPGDNQACKPWTNCTLAGKHTLQPASNSSDAICEDRDPPATQPQETQGPPARPITVQPTEAWPRTSQGPSTRPVEVPGGRAVAAILGLGLVLGLLGPLAILLALYLLRRDQRLPPDAHKPPGGGSFRTPIQEEQADAHSTLAKI

SEQ ID NO: 16774 - protein, 183 aa, Homo sapiens
MERVQPLEENVGNAARPRFERNKLLLVASVIQGLGLLLCFTYICLHFSALQVSHRYPRIQSIKVQFTEYKKEKGFILTSQKEDEIMKVQNNSVIINCDGFYLISLKGYFSQEVNISLHYQKDEEPLFQLKKVRSVNSLMVASLTYKDKVYLNVTTDNTSLDDFHVNGGELILIHQNPGEFCVL

SEQ ID NO: 16775 - protein, 616 aa, Homo sapiens; identical to SEQ ID NO: 13566

SEQ ID NO: 16776 - protein, 273 aa, Homo sapiens
MKKTQTWILTCIYLQLLLFNPLVKTEGICRNRVTNNVKDVTKLVANLPKDYMITLKYVPGMDVLPSHCWISEMVVQLSDSLTDLLDKFSNISEGLSNYSIIDKLVNIVDDLVECVKENSSKDLKKSFKSPEPRLFTPEEFFRIFNRSIDAFKDFVVASETSDCVVSSTLSPEKDSRVSVTKPFMLPPVAASSLRNDSSSSNRKAKNPPGDSSLHWAAMALPALFSLIIGFAFGALYWKKRQPSLTRAVENIQINEEDNEISMLQEKEREFQEV

SEQ ID NO: 16777 - protein, 293 aa, Homo sapiens
MSGLGRSRRGGRSRVDQEERFPQGLWTGVAMRSCPEEQYWDPLLGTCMSCKTICNHQSQRTCAAFCRSLSCRKEQGKFYDHLLRDCISCASICGQHPKQCAYFCENKLRSPVNLPPELRRQRSGEVENNSDNSGRYQGLEHRGSEASPALPGLKLSADQVALVYSTLGLCLCAVLCCFLVAVACFLKKRGDPCSCQPRSRPRQSPAKSSQDHAMEAGSPVSTSPEPVETCSFCFPECRAPTQESAVTPGTPDPTCAGRWGCHTRTTVLQPCPHIPDSGLGIVCVPAQEGGPGA

SEQ ID NO: 16778 - protein, 285 aa, Homo sapiens
MDDSTEREQSRLTSCLKKREEMKLKECVSILPRKESPSVRSSKDGKLLAATLLLALLSCCLTVVSFYQVAALQGDLASLRAELQGHHAEKLPAGAGAPKAGLEEAPAVTAGLKIFEPPAPGEGNSSQNSRNKRAVQGPEETVTQDCLQLIADSETPTIQKGSYTFVPWLLSFKRGSALEEKENKILVKETGYFFIYGQVLYTDKTYAMGHLIQRKKVHVFGDELSLVTLFRCIQNMPETLPNNSCYSAGIAKLEEGDELQLAIPRENAQISLDGDVTFFGALKLL

SEQ ID NO: 16779 - protein, 503 aa, Homo sapiens; identical to SEQ ID NO: 13190

SEQ ID NO: 16780 - protein, 567 aa, Homo sapiens; identical to SEQ ID NO: 14646

SEQ ID NO: 16781 - protein, 851 aa, Homo sapiens; identical to SEQ ID NO: 13193

SEQ ID NO: 16782 - protein, 390 aa, Homo sapiens
MPPSGLRLLLLLLPLLWLLVLTPGRPAAGLSTCKTIDMELVKRKRIEAIRGQILSKLRLASPPSQGEVPPGPLPEAVLALYNSTRDRVAGESAEPEPEPEADYYAKEVTRVLMVETHNEIYDKFKQSTHSIYMFFNTSELREAVPEPVLLSRAELRLLRLKLKVEQHVELYQKYSNNSWRYLSNRLLAPSDSPEWLSFDVTGVVRQWLSRGGEIEGFRLSAHCSCDSRDNTLQVDINGFTTGRRGDLATIHGMNRPFLLLMATPLERAQHLQSSRHRRALDTNYCFSSTEKNCCVRQLYIDFRKDLGWKWIHEPKGYHANFCLGPCPYIWSLDTQYSKVLALYNQHNPGASAAPCCVPQALEPLPIVYYVGRKPKVEQLSNMIVRSCKCS

SEQ ID NO: 16783 - protein, 414 aa, Homo sapiens; identical to SEQ ID NO: 13169

SEQ ID NO: 16784 - protein, 412 aa, Homo sapiens; identical to SEQ ID NO: 13171

SEQ ID NO: 16785 - protein, 233 aa, Homo sapiens; identical to SEQ ID NO: 16534

SEQ ID NO: 16786 - protein, 205 aa, Homo sapiens; identical to SEQ ID NO: 8096

SEQ ID NO: 16787 - protein, 933 aa, Homo sapiens; identical to SEQ ID NO: 13691

SEQ ID NO: 16788 - protein, 635 aa, Homo sapiens
MPSWALFMVTSCLLLAPQNLAQVSSQDVSLLASDSEPLKCFSRTFEDLTCFWDEEEAAPSGTYQLLYAYPREKPRACPLSSQSMPHFGTRYVCQFPDQEEVRLFFPLHLWVKNVFLNQTRTQRVLFVDSVGLPAPPSIIKAMGGSQPGELQISWEEPAPEISDFLRYELRYGPRDPKNSTGPTVIQLIATETCCPALQRPHSASALDQSPCAQPTMPWQDGPKQTSPSREASALTAEGGSCLISGLQPGNSYWLQLRSEPDGISLGGSWGSWSLPVTVDLPGDAVALGLQCFTLDLKNVTCQWQQQDHASSQGFFYHSRARCCPRDRYPIWENCEEEEKTNPGLQTPQFSRCHFKSRNDSIIHILVEVTTAPGTVHSYLGSPFWIHQAVRLPTPNLHWREISSGHLELEWQHPSSWAAQETCYQLRYTGEGHQDWKVLEPPLGARGGTLELRPRSRYRLQLRARLNGPTYQGPWSSWSDPTRVETATETAWISLVTALHLVLGLSAVLGLLLLRWQFPAHYRRLRHALWPSLPDLHRVLGQYLRDTAALSPPKATVSDTCEEVEPSLLEILPKSSERTPLPLCSSQAQMDYRRLQPSCLGTMPLSVCPPMAESGSCCTTHIANHSYLPLSYWQQP

SEQ ID NO: 16789 - protein, 281 aa, Homo sapiens [sequence omitted]

SEQ ID NO: 16790 - protein, 468 aa, Homo sapiens; identical to SEQ ID NO: 16514

SEQ ID NO: 16791 - protein, 440 aa, Homo sapiens; identical to SEQ ID NO: 16515

SEQ ID NO: 16792 - protein, 317 aa, Homo sapiens; identical to SEQ ID NO: 13618

SEQ ID NO: 16793 - protein, 249 aa, Homo sapiens; identical to SEQ ID NO: 13620

SEQ ID NO: 16794 - protein, 114 aa, Homo sapiens; identical to SEQ ID NO: 14365

SEQ ID NO: 16795 - protein, 114 aa, Homo sapiens; identical to SEQ ID NO: 14366

SEQ ID NO: 16796-16931 - skipped (136 entries)

SEQ ID NO: 16932 - protein, 11 aa, synthetic construct
  source 1..11: note = Synthetic Sequence
CCCCCCCCCCC

SEQ ID NO: 16933-16942 - skipped (10 entries)

SEQ ID NO: 16943 - protein, 11 aa, synthetic construct
  source 1..11: note = Synthetic Sequence
CCCCCCCCCCC

SEQ ID NO: 16944-16999 - skipped (56 entries)

SEQ ID NO: 17000 - protein, 21 aa, Homo sapiens
MALPVTALLLPLALLLHAARP

SEQ ID NO: 17001 - DNA, 63 bp, Homo sapiens
  source 1..63: mol_type = genomic DNA
atggcactgccagtcaccgccctgctgctgcctctggctctgctgctgcacgcagctagacca

SEQ ID NO: 17002 - protein, 24 aa, Homo sapiens
IYIWAPLAGTCGVLLLSLVITLYC

SEQ ID NO: 17003 - DNA, 72 bp, Homo sapiens
  source 1..72: mol_type = genomic DNA
atctacatttgggcaccactggccgggacctgtggagtgctgctgctgagcctggtcatcacactgtactgc

SEQ ID NO: 17004 - protein, 112 aa, Homo sapiens
RVKFSRSADAPAYKQGQNQLYNELNLGRREEYDVLDKRRGRDPEMGGKPRRKNPQEGLYNELQKDKMAEAYSEIGMKGERRRGKGHDGLYQGLSTATKDTYDALHMQALPPR

SEQ ID NO: 17005 - DNA, 336 bp, Homo sapiens
  source 1..336: mol_type = genomic DNA
cgcgtgaagtttagtcgatcagcagatgccccagcttacaaacagggacagaaccagctgtataacgagctgaatctgggccgccgagaggaatatgacgtgctggataagcggagaggacgcgaccccgaaatgggaggcaagcccaggcgcaaaaaccctcaggaaggcctgtataacgagctgcagaaggacaaaatggcagaagcctattctgagatcggcatgaagggggagcgacggagaggcaaagggcacgatgggctgtaccagggactgagcaccgccacaaaggacacctatgatgctctgcatatgcaggcactgcctccaagg

SEQ ID NO: 17006 - protein, 42 aa, Homo sapiens
KRGRKKLLYIFKQPFMRPVQTTQEEDGCSCRFPEEEEGGCEL

SEQ ID NO: 17007 - DNA, 126 bp, Homo sapiens
  source 1..126: mol_type = genomic DNA
aagagaggcaggaagaaactgctgtatattttcaaacagcccttcatgcgccccgtgcagactacccaggaggaagacgggtgctcctgtcgattccctgaggaagaggaaggcgggtgtgagctg

SEQ ID NO: 17008 - protein, 45 aa, Homo sapiens
TTTPAPRPPTPAPTIASQPLSLRPEACRPAAGGAVHTRGLDFACD

SEQ ID NO: 17009 - DNA, 135 bp, Homo sapiens
  source 1..135: mol_type = genomic DNA
accacaacccctgcccccagacctcccacacccgcccctaccatcgcgagtcagcccctgagtctgagacctgaggcctgcaggccagctgcaggaggagctgtgcacaccaggggcctggacttcgcctgcgac

SEQ ID NO: 17010 - protein, 89 aa, Homo sapiens
LPAPKNLVVSEVTEDSLRLSWTAPDAAFDSFLIQYQESEKVGEAINLTVPGSERSYDLTGLKPGTEYTVSIYGVKGGHRSNPLSAEFTT

SEQ ID NO: 17011 - protein, 90 aa, Homo sapiens
MLPAPKNLVVSEVTEDSLRLSWTAPDAAFDSFLIQYQESEKVGEAINLTVPGSERSYDLTGLKPGTEYTVSIYGVKGGHRSNPLSAEFTT

SEQ ID NO: 17012 - protein, 107 aa, Homo sapiens
GVQVETISPGDGRTFPKRGQTCVVHYTGMLEDGKKVDSSRDRNKPFKFMLGKQEVIRGWEEGVAQMSVGQRAKLTISPDYAYGATGHPGIIPPHATLVFDVELLKLE

SEQ ID NO: 17013 - DNA, 321 bp, Homo sapiens
  source 1..321: mol_type = genomic DNA
ggggtccaggtcgagactatttcaccaggggatgggcgaacatttccaaaaaggggccagacttgcgtcgtgcattacaccgggatgctggaggacgggaagaaagtggacagctccagggatcgcaacaagcccttcaagttcatgctgggaaagcaggaagtgatccgaggatgggaggaaggcgtggcacagatgtcagtcggccagcgggccaaactgaccattagccctgactacgcttatggagcaacaggccacccagggatcattccccctcatgccaccctggtcttcgatgtggaactgctgaagctggag

SEQ ID NO: 17014 - skipped

SEQ ID NO: 17015 - DNA, 15 bp, Homo sapiens
  source 1..15: mol_type = genomic DNA
ggaggaggaggatcc

SEQ ID NO: 17016 - protein, 282 aa, Homo sapiens
GFGDVGALESLRGNADLAYILSMEPCGHCLIINNVNFCRESGLRTRTGSNIDCEKLRRRFSSLHFMVEVKGDLTAKKMVLALLELAQQDHGALDCCVVVILSHGCQASHLQFPGAVYGTDGCPVSVEKIVNIFNGTSCPSLGGKPKLFFIQACGGEQKDHGFEVASTSPEDESPGSNPEPDATPFQEGLRTFDQLDAISSLPTPSDIFVSYSTFPGFVSWRDPKSGSWYVETLDDIFEQWAHSEDLQSLLLRVANAVSVKGIYKQMPGCFNFLRKKLFFKTS

SEQ ID NO: 17017 - DNA, 843 bp, Homo sapiens
  source 1..843: mol_type = genomic DNA
tttggggacgtgggggccctggagtctctgcgaggaaatgccgatctggcttacatcctgagcatggaaccctgcggccactgtctgatcattaacaatgtgaacttctgcagagaaagcggactgcgaacacggactggctccaatattgactgtgagaagctgcggagaaggttctctagtctgcactttatggtcgaagtgaaaggggatctgaccgccaagaaaatggtgctggccctgctggagctggctcagcaggaccatggagctctggattgctgcgtggtcgtgatcctgtcccacgggtgccaggcttctcatctgcagttccccggagcagtgtacggaacagacggctgtcctgtcagcgtggagaagatcgtcaacatcttcaacggcacttcttgccctagtctggggggaaagccaaaactgttctttatccaggcctgtggcggggaacagaaagatcacggcttcgaggtggccagcaccagccctgaggacgaatcaccagggagcaaccctgaaccagatgcaactccattccaggagggactgaggacctttgaccagctggatgctatctcaagcctgcccactcctagtgacattttcgtgtcttacagtaccttcccaggctttgtctcatggcgcgatcccaagtcagggagctggtacgtggagacactggacgacatctttgaacagtgggcccattcagaggacctgcagagcctgctgctgcgagtggcaaacgctgtctctgtgaagggcatctacaaacagatgcccgggtgcttcaattttctgagaaagaaactgttctttaagacttcc

SEQ ID NO: 17018 - protein, 394 aa, Homo sapiens
GVQVETISPGDGRTFPKRGQTCVVHYTGMLEDGKKVDSSRDRNKPFKFMLGKQEVIRGWEEGVAQMSVGQRAKLTISPDYAYGATGHPGIIPPHATLVFDVELLKLEGGGGSGFGDVGALESLRGNADLAYILSMEPCGHCLIINNVNFCRESGLRTRTGSNIDCEKLRRRFSSLHFMVEVKGDLTAKKMVLALLELAQQDHGALDCCVVVILSHGCQASHLQFPGAVYGTDGCPVSVEKIVNIFNGTSCPSLGGKPKLFFIQACGGEQKDHGFEVASTSPEDESPGSNPEPDATPFQEGLRTFDQLDAISSLPTPSDIFVSYSTFPGFVSWRDPKSGSWYVETLDDIFEQWAHSEDLQSLLLRVANAVSVKGIYKQMPGCFNFLRKKLFFKTS

SEQ ID NO: 17019 - DNA, 1182 bp, Homo sapiens
  source 1..1182: mol_type = genomic DNA
ggggtccaggtcgagactatttcaccaggggatgggcgaacatttccaaaaaggggccagacttgcgtcgtgcattacaccgggatgctggaggacgggaagaaagtggacagctccagggatcgcaacaagcccttcaagttcatgctgggaaagcaggaagtgatccgaggatgggaggaaggcgtggcacagatgtcagtcggccagcgggccaaactgaccattagccctgactacgcttatggagcaacaggccacccagggatcattccccctcatgccaccctggtcttcgatgtggaactgctgaagctggagggaggaggaggatccggatttggggacgtgggggccctggagtctctgcgaggaaatgccgatctggcttacatcctgagcatggaaccctgcggccactgtctgatcattaacaatgtgaacttctgcagagaaagcggactgcgaacacggactggctccaatattgactgtgagaagctgcggagaaggttctctagtctgcactttatggtcgaagtgaaaggggatctgaccgccaagaaaatggtgctggccctgctggagctggctcagcaggaccatggagctctggattgctgcgtggtcgtgatcctgtcccacgggtgccaggcttctcatctgcagttccccggagcagtgtacggaacagacggctgtcctgtcagcgtggagaagatcgtcaacatcttcaacggcacttcttgccctagtctggggggaaagccaaaactgttctttatccaggcctgtggcggggaacagaaagatcacggcttcgaggtggccagcaccagccctgaggacgaatcaccagggagcaaccctgaaccagatgcaactccattccaggagggactgaggacctttgaccagctggatgctatctcaagcctgcccactcctagtgacattttcgtgtcttacagtaccttcccaggctttgtctcatggcgcgatcccaagtcagggagctggtacgtggagacactggacgacatctttgaacagtgggcccattcagaggacctgcagagcctgctgctgcgagtggcaaacgctgtctctgtgaagggcatctacaaacagatgcccgggtgcttcaattttctgagaaagaaactgttctttaagacttcc

SEQ ID NO: 17020 - protein, 18 aa, Homo sapiens
EGRGSLLTCGDVEENPGP

SEQ ID NO: 17021 - protein, 21 aa, Homo sapiens
GSGEGRGSLLTCGDVEENPGP

SEQ ID NO: 17022 - protein, 20 aa, Homo sapiens
QCTNYALLKLAGDVESNPGP

SEQ ID NO: 17023 - protein, 23 aa, Homo sapiens
GSGQCTNYALLKLAGDVESNPGP

SEQ ID NO: 17024 - protein, 22 aa, Homo sapiens
VKQTLNFDLLKLAGDVESNPGP

SEQ ID NO: 17025 - protein, 25 aa, Homo sapiens
GSGVKQTLNFDLLKLAGDVESNPGP

SEQ ID NO: 17026 - protein, 19 aa, Homo sapiens
ATNFSLLKQAGDVEENPGP

SEQ ID NO: 17027 - protein, 22 aa, Homo sapiens
GSGATNFSLLKQAGDVEENPGP

SEQ ID NO: 17028 - DNA, 135 bp, Homo sapiens
  source 1..135: mol_type = genomic DNA
actaccacaccagcacctagaccaccaactccagctccaaccatcgcgagtcagcccctgagtctgagacctgaggcctgcaggccagctgcaggaggagctgtgcacaccaggggcctggacttcgcctgcgac

SEQ ID NO: 17029 - protein, 594 aa, synthetic construct
  source 1..594: note = Synthetic Sequence
MGSSLDDEHILSALLQSDDELVGEDSDSEISDHVSEDDVQSDTEEAFIDEVHEVQPTSSGSEILDEQNVIEQPGSSLASNRILTLPQRTIRGKNKHCWSTSKSTRRSRVSALNIVRSQRGPTRMCRNIYDPLLCFKLFFTDEIISEIVKWTNAEISLKRRESMTGATFRDTNEDEIYAFFGILVMTAVRKDNHMSTDDLFDRSLSMVYVSVMSRDRFDFLIRCLRMDDKSIRPTLRENDVFTPVRKIWDLFIHQCIQNYTPGAHLTIDEQLLGFRGRCPFRMYIPNKPSKYGIKILMMCDSGYKYMINGMPYLGRGTQTNGVPLGEYYVKELSKPVHGSCRNITCDNWFTSIPLAKNLLQEPYKLTIVGTVRSNKREIPEVLKNSRSRPVGTSMFCFDGPLTLVSYKPKPAKMVYLLSSCDEDASINESTGKPQMVMYYNQTKGGVDTLDQMCSVMTCSRKTNRWPMALLYGMINIACINSFIIYSHNVSSKGEKVQSRKKFMRNLYMSLTSSFMRKRLEAPTLKRYLRDNISNILPNEVPGTSDDSTEEPVMKKRTYCTYCPSKIRRKANASCKKCKKVICREHNIDMCQSCF

SEQ ID NO: 17030 - protein, 594 aa, synthetic construct; identical to SEQ ID NO: 14484
  source 1..594: note = Synthetic Sequence

SEQ ID NO: 17031 - protein, 340 aa, synthetic construct
  source 1..340: note = Synthetic Sequence
MGKSKEISQDLRKKIVDLHKSGSSLGAISKRLKVPRSSVQTIVRKYKHHGTTQPSYRSGRRRYLSPRDERTLVRKVQINPRTTAKDLVKMLEETGTKVSISTVKRVLYRHNLKGRSARKKPLLQNRHKKARLRFATAHGDKDRTFWRNVLWSDETKIELFGHNDHRYVWRKKGEACKPKNTIPTVKHGGGSIMLWGCFAAGGTGALHKIDGIMRKENYVDILKQHLKTSVRKLKLGRKWVFQMDNDPKHTSKVVAKWLKDNKVKVLEWPSQSPDLNPIENLWAELKKRVRARRPTNLTQLHQLCQEEWAKIHPTYCGKLVEGYPKRLTQVKQFKGNATKY

SEQ ID NO: 17032 - protein, 340 aa, synthetic construct
  source 1..340: note = Synthetic Sequence
MGKSKEISQDLRKRIVDLHKSGSSLGAISKRLAVPRSSVQTIVRKYKHHGTTQPSYRSGRRRYLSPRDERTLVRKVQINPRTTAKDLVKMLEETGTKVSISTVKRVLYRHNLKGHSARKKPLLQNRHKKARLRFATAHGDKDRTFWRNVLWSDETKIELFGHNDHRYVWRKKGEACKPKNTIPTVKHGGGSIMLWGCFAAGGTGALHKIDGIMDAVQYVDILKQHLKTSVRKLKLGRKWVFQHDNDPKHTSKVVAKWLKDNKVKVLEWPSQSPDLNPIENLWAELKKRVRARRPTNLTQLHQLCQEEWAKIHPNYCGKLVEGYPKRLTQVKQFKGNATKY

SEQ ID NO: 17033 - DNA, 15 bp, synthetic construct
  source 1..15: mol_type = other DNA; note = Synthetic Sequence
ggggsggggsggggs

SEQ ID NO: 17034 - DNA, 270 bp, synthetic construct
  source 1..270: mol_type = other DNA; note = Synthetic Sequence
atgctgcctgcaccaaagaacctggtggtgtctcatgtgacagaggatagtgccagactgtcatggactgctcccgacgcagccttcgatagttttatcatcgtgtaccgggagaacatcgaaaccggcgaggccattgtcctgacagtgccagggtccgaacgctcttatgacctgacagatctgaagcccggaactgagtactatgtgcagatcgccggcgtcaaaggaggcaatatcagcttccctctgtccgcaatcttcaccaca

SEQ ID NO: 17035 - protein, 4 aa, synthetic construct
  source 1..4: note = Synthetic Sequence
TEDS

SEQ ID NO: 17036 - protein, 7 aa, synthetic construct
  source 1..7: note = Synthetic Sequence
TAPDAAF

SEQ ID NO: 17037 - protein, 6 aa, synthetic construct
  source 1..6: note = Synthetic Sequence
SEKVGE

SEQ ID NO: 17038 - protein, 4 aa, synthetic construct
  source 1..4: note = Synthetic Sequence
GSER

SEQ ID NO: 17039 - protein, 5 aa, synthetic construct
  source 1..5: note = Synthetic Sequence
GLKPG

SEQ ID NO: 17040 - protein, 7 aa, synthetic construct
  source 1..7: note = Synthetic Sequence
KGGHRSN

SEQ ID NO: 17041 - DNA, 4682 bp, synthetic construct
  source 1..4682: mol_type = other DNA; note = Synthetic Sequence
cagaggtgtaaagtacttgagtaattttacttgattactgtacttaagtattatttttggggatttttactttacttgagtacaattaaaaatcaatacttttacttttacttaattacatttttttagaaaaaaaagtactttttactccttacaattttatttacagtcaaaaagtacttattttttggagatcacttcattctattttcccttgctattaccaaaccaattgaattgcgctgatgcccagtttaatttaaatgttatttattctgcctatgaaaatcgttttcacattatatgaaattggtcagacatgttcattggtcctttggaagtgacgtcatgtcacatctattaccacaatgcacagcaccttgacctggaaattagggaaattataacagtcaatcagtggaagaaaatggaggaagtatgtgattcatcagcagctgcgagcagcacagtccaaaatcagccacaggatcaagagcacccgtggccgtatcttcgcgaattcttttctttaagtggtgtaaataaagattcattcaagatgaaatgtgtcctctgtctcccgcttaataaagaaatatcggccttcaaaagttcgccatcaaacctaaggaagcatattgaggtaagtacattaagtattttgttttactgatagtttttttttttttttttttttttttttttgggtgtgcatgttttgacgttgatggcgcgccttttatatgtgtagtaggcctattttcactaatgcatgcgattgacaatataaggctcacgtaataaaatgctaaaatgcatttgtaattggtaacgttaggtccacgggaaatttggcgcctattgcagctttgaataatcattatcattccgtgctctcattgtgtttgaattcatgcaaaacacaagaaaaccaagcgagaaatttttttccaaacatgttgtattgtcaaaacggtaacactttacaatgaggttgattagttcatgtattaactaacattaaataaccatgagcaatacatttgttactgtatctgttaatctttgttaacgttagttaatagaaatacagatgttcattgtttgttcatgttagttcacagtgcattaactaatgttaacaagatataaagtattagtaaatgttgaaattaacatgtatacgtgcagttcattattagttcatgttaactaatgtagttaactaacgaaccttattgtaaaagtgttaccatcaaaactaatgtaatgaaatcaattcaccctgtcatgtcagccttacagtcctgtgtttttgtcaatataatcagaaataaaattaatgtttgattgtcactaaatgctactgtatttctaaaatcaacaagtatttaacattataaagtgtgcaattggctgcaaatgtcagttttattaaagggttagttcacccaaaaatgaaaataatgtcattaatgactcgccctcatgtcgttccaagcccgtaagacctccgttcatcttcagaacacagtttaagatattttagatttagtccgagagctttctgtgcctccattgagaatgtatgtacggtatactgtccatgtccagaaaggtaataaaaacatcaaagtagtccatgtgacatcagtgggttagttagaattttttgaagcatcgaatacattttggtccaaaaataacaaaacctacgactttattcggcattgtattctcttccgggtctgttgtcaatccgcgttcacgacttcgcagtgacgctacaatgctgaataaagtcgtaggttttgttatttttggaccaaaatgtattttcgatgcttcaaataattctacctaacccactgatgtcacatggactactttgatgtttttattacctttctggacatggacagtataccgtacatacattttcagtggagggacagaaagctctcggactaaatctaaaatatcttaaactgtgttccgaagatgaacggaggtgttacgggcttggaacgacatgagggtgagtcattaatgacatcttttcatttttgggtgaactaaccctttaatgctgtaatcagagagtgtatgtgtaattgttacatttattgcatacaatataaatatttatttgttgtttttacagagaatgcacccaaattacctcaaaaactactctaaattgacagcacagaagagaaagatcgggacctccacccatgcttccagcagtaagcaactgaaagttgactcagttttcccagtcaaacatgtgtctccagtcactgtgaacaaagctatattaaggtacatcattcaaggacttcatcctttcagcactgttgatctgccatcatttaaagagctgattagtacactgcagcctggcatttctgtcattacaaggcctactttacgctccaagatagctgaagctgctctgatcatgaaacagaaagtgactgctgccatgagtgaagttgaatggattgcaaccacaacggattgttggactgcacgtagaaagtcattcattggtgtaactgctcactggatcaaccctggaagtcttgaaagacattccgctgcacttgcctgcaaaagattaatgggctctcatacttttgaggtactggccagtgccatgaatgatatccactcagagtatgaaatacgtgacaaggttgtttgcacaaccacagacagtggttccaactttatgaaggctttcagagtttttggtgtggaaaacaatgatatcgagactgaggcaagaaggtgtgaaagtgatgacactgattctgaaggctgtggtgagggaagtgatggtgtggaattccaagatgcctcacgagtcctggaccaagacgatggcttcgaattccagctaccaaaacatcaaaagtgtgcctgtcacttacttaacctagtctcaagcgttgatgcccaaaaagctctctcaaatgaacactacaagaaactctacagatctgtctttggcaaatgccaagctttatggaataaaagcagccgatcggctctagcagctgaagctgttgaatcagaaagccggcttcagcttttaaggccaaaccaaacgcggtggaattcaacttttatggctgttgacagaattcttcaaatttgcaaagaagcaggagaaggcgcacttcggaatatatgcacctctcttgaggttccaatgtaagtgtttttcccctctatcgatgtaaacaaatgtgggttgtttttgtttaatactctttgattatgctgatttctcctgtaggtttaatccagcagaaatgctgttcttgacagagtgggccaacacaatgcgtccagttgcaaaagtactcgacatcttgcaagcggaaacgaatacacagctggggtggctgctgcctagtgtccatcagttaagcttgaaacttcagcgactccaccattctctcaggtactgtgacccacttgtggatgccctacaacaaggaatccaaacacgattcaagcatatgtttgaagatcctgagatcatagcagctgccatccttctccctaaatttcggacctcttggacaaatgatgaaaccatcataaaacgaggtaaatgaatgcaagcaacatacacttgacgaattctaatctgggcaacctttgagccataccaaaattattcttttatttatttatttttgcactttttaggaatgttatatcccatctttggctgtgatctcaatatgaatattgatgtaaagtattcttgcagcaggttgtagttatccctcagtgtttcttgaaaccaaactcatatgtatcatatgtggtttggaaatgcagttagattttatgctaaaataagggatttgcatgattttagatgtagatgactgcacgtaaatgtagttaatgacaaaatccataaaatttgttcccagtcagaagcccctcaaccaaacttttctttgtgtctgctcactgtgcttgtaggcatggactacatcagagtgcatctggagcctttggaccacaagaaggaattggccaacagttcatctgatgatgaagattttttcgcttctttgaaaccgacaacacatgaagccagcaaagagttggatggatatctggcctgtgtttcagacaccagggagtctctgctcacgtttcctgctatttgcagcctctctatcaagactaatacacctcttcccgcatcggctgcctgtgagaggcttttcagcactgcaggattgcttttcagccccaaaagagctaggcttgacactaacaattttgagaatcagcttctactgaagttaaatctgaggttttacaactttgagtagcgtgtactggcattagattgtctgtcttatagtttgataattaaatacaaacagttctaaagcaggataaaaccttgtatgcatttcatttaatgttttttgagattaaaagcttaaacaagaatctctagttttctttcttgcttttacttttacttccttaatactcaagtacaattttaatggagtacttttttacttttactcaagtaagattctagccagatacttttacttttaattgagtaaaattttccctaagtacttgtactttcacttgagtaaaatttttgagtactttttacacctctg

SEQ ID NO: 17042-17072 - skipped (31 entries)

SEQ ID NO: 17073 - DNA, 4897 bp, synthetic construct
  source 1..4897: mol_type = other DNA; note = Synthetic Sequence
tgtacatagattaaccctagaaagataatcatattgtgacgtacgttaaagataatcatgcgtaaaattgacgcatgtgttttatcggtctgtatatcgaggtttatttattaatttgaatagatattaagttttattatatttacacttacatactaataataaattcaacaaacaatttatttatgtttatttatttattaaaaaaaaacaaaaactcaaaatttcttctataaagtaacaaaacttttatcgaatacctgcagcccgggggatgcagagggacagcccccccccaaagcccccagggatgtaattacgtccctcccccgctagggggcagcagcgagccgcccggggctccgctccggtccggcgctccccccgcatccccgagccggcagcgtgcggggacagcccgggcacggggaaggtggcacgggatcgctttcctctgaacgcttctcgctgctctttgagcctgcagacacctggggggatacggggaaaagttgactgtgcctttcgatcgaaccatggacagttagctttgcaaagatggataaagttttaaacagagaggaatctttgcagctaatggaccttctaggtcttgaaaggagtgggaattggctccggtgcccgtcagtgggcagagcgcacatcgcccacagtccccgagaagttggggggaggggtcggcaattgaaccggtgcctagagaaggtggcgcggggtaaactgggaaagtgatgtcgtgtactggctccgcctttttcccgagggtgggggagaaccgtatataagtgcagtagtcgccgtgaacgttctttttcgcaacgggtttgccgccagaacacaggtaagtgccgtgtgtggttcccgcgggcctggcctctttacgggttatggcccttgcgtgccttgaattacttccacctggctgcagtacgtgattcttgatcccgagcttcgggttggaagtgggtgggagagttcgaggccttgcgcttaaggagccccttcgcctcgtgcttgagttgaggcctggcctgggcgctggggccgccgcgtgcgaatctggtggcaccttcgcgcctgtctcgctgctttcgataagtctctagccatttaaaatttttgatgacctgctgcgacgctttttttctggcaagatagtcttgtaaatgcgggccaagatctgcacactggtatttcggtttttggggccgcgggcggcgacggggcccgtgcgtcccagcgcacatgttcggcgaggcggggcctgcgagcgcggccaccgagaatcggacgggggtagtctcaagctggccggcctgctctggtgcctggcctcgcgccgccgtgtatcgccccgccctgggcggcaaggctggcccggtcggcaccagttgcgtgagcggaaagatggccgcttcccggccctgctgcagggagctcaaaatggaggacgcggcgctcgggagagcgggcgggtgagtcacccacacaaaggaaaagggcctttccgtcctcagccgtcgcttcatgtgactccacggagtaccgggcgccgtccaggcacctcgattagttctcgagcttttggagtacgtcgtctttaggttggggggaggggttttatgcgatggagtttccccacactgagtgggtggagactgaagttaggccagcttggcacttgatgtaattctccttggaatttgccctttttgagtttggatcttggttcattctcaagcctcagacagtggttcaaagtttttttcttccatttcaggtgtcgtgagaattctaatacgactcactatagggtgtgctgtctcatcattttggcaaagattggccaccaagcttgtcctgcaggagggtcgacgcctctagacgggcggccgctccggatccacgggtaccgatcacatatgcctttaattaaacactagttctatagtgtcacctaaattccctttagtgagggttaatggccgtaggccgccagaattgggtccagacatgataagatacattgatgagtttggacaaaccacaactagaatgcagtgaaaaaaatgctttatttgtgaaatttgtgatgctattgctttatttgtaaccattataagctgcaataaacaagttaacaacaacaattgcattcattttatgtttcaggttcagggggaggtgtgggaggttttttcggactctaggacctgcgcatgcgcttggcgtaatcatggtcatagctgtttcctgttttccccgtatccccccaggtgtctgcaggctcaaagagcagcgagaagcgttcagaggaaagcgatcccgtgccaccttccccgtgcccgggctgtccccgcacgctgccggctcggggatgcggggggagcgccggaccggagcggagccccgggcggctcgctgctgccccctagcgggggagggacgtaattacatccctgggggctttgggggggggctgtccctctcaccgcggtggagctccagcttttgttcgaattggggccccccctcgagggtatcgatgatatctataacaagaaaatatatatataataagttatcacgtaagtagaacatgaaataacaatataattatcgtatgagttaaatcttaaaagtcacgtaaaagataatcatgcgtcattttgactcacgcggtcgttatagttcaaaatcagtgacacttaccgcattgacaagcacgcctcacgggagctccaagcggcgactgagatgtcctaaatgcacagcgacggattcgcgctatttagaaagagagagcaatatttcaagaatgcatgcgtcaattttacgcagactatctttctagggttaatctagctagccttaagggcgcctattgcgttgcgctcactgcccgctttccagtcgggaaacctgtcgtgccagctgcattaatgaatcggccaacgcgcggggagaggcggtttgcgtattgggcgctcttccgcttcctcgctcactgactcgctgcgctcggtcgttcggctgcggcgagcggtatcagctcactcaaaggcggtaatacggttatccacagaatcaggggataacgcaggaaagaacatgaccaaaatcccttaacgtgagttttcgttccactgagcgtcagaccccgtagaaaagatcaaaggatcttcttgagatcctttttttctgcgcgtaatctgctgcttgcaaacaaaaaaaccaccgctaccagcggtggtttgtttgccggatcaagagctaccaactctttttccgaaggtaactggcttcagcagagcgcagataccaaatactgttcttctagtgtagccgtagttaggccaccacttcaagaactctgtagcaccgcctacatacctcgctctgctaatcctgttaccagtggctgctgccagtggcgataagtcgtgtcttaccgggttggactcaagacgatagttaccggataaggcgcagcggtcgggctgaacggggggttcgtgcacacagcccagcttggagcgaacgacctacaccgaactgagatacctacagcgtgagctatgagaaagcgccacgcttcccgaagggagaaaggcggacaggtatccggtaagcggcagggtcggaacaggagagcgcacgagggagcttccagggggaaacgcctggtatctttatagtcctgtcgggtttcgccacctctgacttgagcgtcgatttttgtgatgctcgtcaggggggcggagcctatggaaaaacgccagcaacgcggcctttttacggttcctggccttttgctggccttttgctcacatgagattatcaaaaaggatcttcacctagatccttttaaattaaaaatgaagttttaaatcaatctaaagtatatatgagtaaacttggtctgacagtcagaagaactcgtcaagaaggcgatagaaggcgatgcgctgcgaatcgggagcggcgataccgtaaagcacgaggaagcggtcagcccattcgccgccaagctcttcagcaatatcacgggtagccaacgctatgtcctgatagcggtccgccacacccagccggccacagtcgatgaatccagaaaagcggccattttccaccatgatattcggcaagcaggcatcgccatgggtcacgacgagatcctcgccgtcgggcatgctcgccttgagcctggcgaacagttcggctggcgcgagcccctgatgctcttcgtccagatcatcctgatcgacaagaccggcttccatccgagtacgtgctcgctcgatgcgatgtttcgcttggtggtcgaatgggcaggtagccggatcaagcgtatgcagccgccgcattgcatcagccatgatggatactttctcggcaggagcaaggtgagatgacaggagatcctgccccggcacttcgcccaatagcagccagtcccttcccgcttcagtgacaacgtcgagcacagctgcgcaaggaacgcccgtcgtggccagccacgatagccgcgctgcctcgtcttgcagttcattcagggcaccggacaggtcggtcttgacaaaaagaaccgggcgcccctgcgctgacagccggaacacggcggcatcagagcagccgattgtctgttgtgcccagtcatagccgaatagcctctccacccaagcggccggagaacctgcgtgcaatccatcttgttcaatcataatattattgaagcatttatcagggttcgtctcgtcccggtctcctcccaatgcatgtcaatattggccattagccatattattcattggttatatagcataaatcaatattggctattggccattgcatacgttgtatctatatcataata

SEQ ID NO: 17074 - protein, 1053 aa, Staphylococcus aureus
MKRNYILGLDIGITSVGYGIIDYETRDVIDAGVRLFKEANVENNEGRRSKRGARRLKRRRRHRIQRVKKLLFDYNLLTDHSELSGINPYEARVKGLSQKLSEEEFSAALLHLAKRRGVHNVNEVEEDTGNELSTKEQISRNSKALEEKYVAELQLERLKKDGEVRGSINRFKTSDYVKEAKQLLKVQKAYHQLDQSFIDTYIDLLETRRTYYEGPGEGSPFGWKDIKEWYEMLMGHCTYFPEELRSVKYAYNADLYNALNDLNNLVITRDENEKLEYYEKFQIIENVFKQKKKPTLKQIAKEILVNEEDIKGYRVTSTGKPEFTNLKVYHDIKDITARKEIIENAELLDQIAKILTIYQSSEDIQEELTNLNSELTQEEIEQISNLKGYTGTHNLSLKAINLILDELWHTNDNQIAIFNRLKLVPKKVDLSQQKEIPTTLVDDFILSPVVKRSFIQSIKVINAIIKKYGLPNDIIIELAREKNSKDAQKMINEMQKRNRQTNERIEEIIRTTGKENAKYLIEKIKLHDMQEGKCLYSLEAIPLEDLLNNPFNYEVDHIIPRSVSFDNSFNNKVLVKQEENSKKGNRTPFQYLSSSDSKISYETFKKHILNLAKGKGRISKTKKEYLLEERDINRFSVQKDFINRNLVDTRYATRGLMNLLRSYFRVNNLDVKVKSINGGFTSFLRRKWKFKKERNKGYKHHAEDALIIANADFIFKEWKKLDKAKKVMENQMFEEKQAESMPEIETEQEYKEIFITPHQIKHIKDFKDYKYSHRVDKKPNRELINDTLYSTRKDDKGNTLIVNNLNGLYDKDNDKLKKLINKSPEKLLMYHHDPQTYQKLKLIMEQYGDEKNPLYKYYEETGNYLTKYSKKDNGPVIKKIKYYGNKLNAHLDITDDYPNSRNKVVKLSLKPYRFDVYLDNGVYKFVTVKNLDVIKKENYYEVNSKCYEEAKKLKKISNQAEFIASFYNNDLIKINGELYRVIGVNNDLLNRIEVNMIDITYREYLENMNDKRPPRIIKTIASKTQSIKKYSTDILGNLYEVKSKKHPQIIKKG

SEQ ID NO: 17075 - protein, 1053 aa, synthetic construct
  source 1..1053: note = Synthetic Sequence
MKRNYILGLAIGITSVGYGIIDYETRDVIDAGVRLFKEANVENNEGRRSKRGARRLKRRRRHRIQRVKKLLFDYNLLTDHSELSGINPYEARVKGLSQKLSEEEFSAALLHLAKRRGVHNVNEVEEDTGNELSTKEQISRNSKALEEKYVAELQLERLKKDGEVRGSINRFKTSDYVKEAKQLLKVQKAYHQLDQSFIDTYIDLLETRRTYYEGPGEGSPFGWKDIKEWYEMLMGHCTYFPEELRSVKYAYNADLYNALNDLNNLVITRDENEKLEYYEKFQIIENVFKQKKKPTLKQIAKEILVNEEDIKGYRVTSTGKPEFTNLKVYHDIKDITARKEIIENAELLDQIAKILTIYQSSEDIQEELTNLNSELTQEEIEQISNLKGYTGTHNLSLKAINLILDELWHTNDNQIAIFNRLKLVPKKVDLSQQKEIPTTLVDDFILSPVVKRSFIQSIKVINAIIKKYGLPNDIIIELAREKNSKDAQKMINEMQKRNRQTNERIEEIIRTTGKENAKYLIEKIKLHDMQEGKCLYSLEAIPLEDLLNNPFNYEVDHIIPRSVSFDNSFNNKVLVKQEEASKKGNRTPFQYLSSSDSKISYETFKKHILNLAKGKGRISKTKKEYLLEERDINRFSVQKDFINRNLVDTRYATRGLMNLLRSYFRVNNLDVKVKSINGGFTSFLRRKWKFKKERNKGYKHHAEDALIIANADFIFKEWKKLDKAKKVMENQMFEEKQAESMPEIETEQEYKEIFITPHQIKHIKDFKDYKYSHRVDKKPNRELINDTLYSTRKDDKGNTLIVNNLNGLYDKDNDKLKKLINKSPEKLLMYHHDPQTYQKLKLIMEQYGDEKNPLYKYYEETGNYLTKYSKKDNGPVIKKIKYYGNKLNAHLDITDDYPNSRNKVVKLSLKPYRFDVYLDNGVYKFVTVKNLDVIKKENYYEVNSKCYEEAKKLKKISNQAEFIASFYNNDLIKINGELYRVIGVNNDLLNRIEVNMIDITYREYLENMNDKRPPRIIKTIASKTQSIKKYSTDILGNLYEVKSKKHPQIIKKG

SEQ ID NO: 17076 - protein, 1368 aa, unidentified
  source 1..1368: note = Staphyloccocus pyogenes
  VARIANT 1: note = misc_feature - Xaa can be any naturally occurring amino acid
XDKKYSIGLAIGTNSVGWAVITDEYKVPSKKFKVLGNTDRHSIKKNLIGALLFDSGETAEATRLKRTARRRYTRRKNRICYLQEIFSNEMAKVDDSFFHRLEESFLVEEDKKHERHPIFGNIVDEVAYHEKYPTIYHLRKKLVDSTDKADLRLIYLALAHMIKFRGHFLIEGDLNPDNSDVDKLFIQLVQTYNQLFEENPINASGVDAKAILSARLSKSRRLENLIAQLPGEKKNGLFGNLIALSLGLTPNFKSNFDLAEDAKLQLSKDTYDDDLDNLLAQIGDQYADLFLAAKNLSDAILLSDILRVNTEITKAPLSASMIKRYDEHHQDLTLLKALVRQQLPEKYKEIFFDQSKNGYAGYIDGGASQEEFYKFIKPILEKMDGTEELLVKLNREDLLRKQRTFDNGSIPHQIHLGELHAILRRQEDFYPFLKDNREKIEKILTFRIPYYVGPLARGNSRFAWMTRKSEETITPWNFEEVVDKGASAQSFIERMTNFDKNLPNEKVLPKHSLLYEYFTVYNELTKVKYVTEGMRKPAFLSGEQKKAIVDLLFKTNRKVTVKQLKEDYFKKIECFDSVEISGVEDRFNASLGTYHDLLKIIKDKDFLDNEENEDILEDIVLTLTLFEDREMIEERLKTYAHLFDDKVMKQLKRRRYTGWGRLSRKLINGIRDKQSGKTILDFLKSDGFANRNFMQLIHDDSLTFKEDIQKAQVSGQGDSLHEHIANLAGSPAIKKGILQTVKVVDELVKVMGRHKPENIVIEMARENQTTQKGQKNSRERMKRIEEGIKELGSQILKEHPVENTQLQNEKLYLYYLQNGRDMYVDQELDINRLSDYDVDAIVPQSFLKDDSIDNKVLTRSDKNRGKSDNVPSEEVVKKMKNYWRQLLNAKLITQRKFDNLTKAERGGLSELDKAGFIKRQLVETRQITKHVAQILDSRMNTKYDENDKLIREVKVITLKSKLVSDFRKDFQFYKVREINNYHHAHDAYLNAVVGTALIKKYPKLESEFVYGDYKVYDVRKMIAKSEQEIGKATAKYFFYSNIMNFFKTEITLANGEIRKRPLIETNGETGEIVWDKGRDFATVRKVLSMPQVNIVKKTEVQTGGFSKESILPKRNSDKLIARKKDWDPKKYGGFDSPTVAYSVLVVAKVEKGKSKKLKSVKELLGITIMERSSFEKNPIDFLEAKGYKEVKKDLIIKLPKYSLFELENGRKRMLASAGELQKGNELALPSKYVNFLYLASHYEKLKGSPEDNEQKQLFVEQHKHYLDEIIEQISEFSKRVILADANLDKVLSAYNKHRDKPIREQAENIIHLFTLTNLGAPAAFKYFDTTIDRKRYTSTKEVLDATLIHQSITGLYETRIDLSQLGGD

SEQ ID NO: 17077 - protein, 1368 aa, unidentified
  source 1..1368: note = Staphyloccocus pyogenes
MDKKYSIGLAIGTNSVGWAVITDEYKVPSKKFKVLGNTDRHSIKKNLIGALLFDSGETAEATRLKRTARRRYTRRKNRICYLQEIFSNEMAKVDDSFFHRLEESFLVEEDKKHERHPIFGNIVDEVAYHEKYPTIYHLRKKLVDSTDKADLRLIYLALAHMIKFRGHFLIEGDLNPDNSDVDKLFIQLVQTYNQLFEENPINASGVDAKAILSARLSKSRRLENLIAQLPGEKKNGLFGNLIALSLGLTPNFKSNFDLAEDAKLQLSKDTYDDDLDNLLAQIGDQYADLFLAAKNLSDAILLSDILRVNTEITKAPLSASMIKRYDEHHQDLTLLKALVRQQLPEKYKEIFFDQSKNGYAGYIDGGASQEEFYKFIKPILEKMDGTEELLVKLNREDLLRKQRTFDNGSIPHQIHLGELHAILRRQEDFYPFLKDNREKIEKILTFRIPYYVGPLARGNSRFAWMTRKSEETITPWNFEEVVDKGASAQSFIERMTNFDKNLPNEKVLPKHSLLYEYFTVYNELTKVKYVTEGMRKPAFLSGEQKKAIVDLLFKTNRKVTVKQLKEDYFKKIECFDSVEISGVEDRFNASLGTYHDLLKIIKDKDFLDNEENEDILEDIVLTLTLFEDREMIEERLKTYAHLFDDKVMKQLKRRRYTGWGRLSRKLINGIRDKQSGKTILDFLKSDGFANRNFMQLIHDDSLTFKEDIQKAQVSGQGDSLHEHIANLAGSPAIKKGILQTVKVVDELVKVMGRHKPENIVIEMARENQTTQKGQKNSRERMKRIEEGIKELGSQILKEHPVENTQLQNEKLYLYYLQNGRDMYVDQELDINRLSDYDVDAIVPQSFLKDDSIDNKVLTRSDKNRGKSDNVPSEEVVKKMKNYWRQLLNAKLITQRKFDNLTKAERGGLSELDKAGFIKRQLVETRQITKHVAQILDSRMNTKYDENDKLIREVKVITLKSKLVSDFRKDFQFYKVREINNYHHAHDAYLNAVVGTALIKKYPKLESEFVYGDYKVYDVRKMIAKSEQEIGKATAKYFFYSNIMNFFKTEITLANGEIRKRPLIETNGETGEIVWDKGRDFATVRKVLSMPQVNIVKKTEVQTGGFSKESILPKRNSDKLIARKKDWDPKKYGGFDSPTVAYSVLVVAKVEKGKSKKLKSVKELLGITIMERSSFEKNPIDFLEAKGYKEVKKDLIIKLPKYSLFELENGRKRMLASAGELQKGNELALPSKYVNFLYLASHYEKLKGSPEDNEQKQLFVEQHKHYLDEIIEQISEFSKRVILADANLDKVLSAYNKHRDKPIREQAENIIHLFTLTNLGAPAAFKYFDTTIDRKRYTSTKEVLDATLIHQSITGLYETRIDLSQLGGD

SEQ ID NO: 17078 - protein, 199 aa, synthetic construct
  source 1..199: note = Synthetic Sequence
EGIKSNISLLKDELRGQISHISHEYLSLIDLAFDSKQNRLFEMKVLELLVNEYGFKGRHLGGSRKPDGIVYSTTLEDNFGIIVDTKAYSEGYSLPISQADEMERYVRENSNRDEEVNPNKWWENFSEEVKKYYFVFISGSFKGKFEEQLRRLSMTTGVNGSAVNVVNLLLGAEKIRSGEMTIEELERAMFNNSEFILKY

SEQ ID NO: 17079 - protein, 1591 aa, unidentified
  source 1..1591: note = Streptoccocus pyogenes
MAPKKKRKVEGIKSNISLLKDELRGQISHISHEYLSLIDLAFDSKQNRLFEMKVLELLVNEYGFKGRHLGGSRKPDGIVYSTTLEDNFGIIVDTKAYSEGYSLPISQADEMERYVRENSNRDEEVNPNKWWENFSEEVKKYYFVFISGSFKGKFEEQLRRLSMTTGVNGSAVNVVNLLLGAEKIRSGEMTIEELERAMFNNSEFILKYGGGGSDKKYSIGLAIGTNSVGWAVITDEYKVPSKKFKVLGNTDRHSIKKNLIGALLFDSGETAEATRLKRTARRRYTRRKNRICYLQEIFSNEMAKVDDSFFHRLEESFLVEEDKKHERHPIFGNIVDEVAYHEKYPTIYHLRKKLVDSTDKADLRLIYLALAHMIKFRGHFLIEGDLNPDNSDVDKLFIQLVQTYNQLFEENPINASGVDAKAILSARLSKSRRLENLIAQLPGEKKNGLFGNLIALSLGLTPNFKSNFDLAEDAKLQLSKDTYDDDLDNLLAQIGDQYADLFLAAKNLSDAILLSDILRVNTEITKAPLSASMIKRYDEHHQDLTLLKALVRQQLPEKYKEIFFDQSKNGYAGYIDGGASQEEFYKFIKPILEKMDGTEELLVKLNREDLLRKQRTFDNGSIPHQIHLGELHAILRRQEDFYPFLKDNREKIEKILTFRIPYYVGPLARGNSRFAWMTRKSEETITPWNFEEVVDKGASAQSFIERMTNFDKNLPNEKVLPKHSLLYEYFTVYNELTKVKYVTEGMRKPAFLSGEQKKAIVDLLFKTNRKVTVKQLKEDYFKKIECFDSVEISGVEDRFNASLGTYHDLLKIIKDKDFLDNEENEDILEDIVLTLTLFEDREMIEERLKTYAHLFDDKVMKQLKRRRYTGWGRLSRKLINGIRDKQSGKTILDFLKSDGFANRNFMQLIHDDSLTFKEDIQKAQVSGQGDSLHEHIANLAGSPAIKKGILQTVKVVDELVKVMGRHKPENIVIEMARENQTTQKGQKNSRERMKRIEEGIKELGSQILKEHPVENTQLQNEKLYLYYLQNGRDMYVDQELDINRLSDYDVDAIVPQSFLKDDSIDNKVLTRSDKNRGKSDNVPSEEVVKKMKNYWRQLLNAKLITQRKFDNLTKAERGGLSELDKAGFIKRQLVETRQITKHVAQILDSRMNTKYDENDKLIREVKVITLKSKLVSDFRKDFQFYKVREINNYHHAHDAYLNAVVGTALIKKYPKLESEFVYGDYKVYDVRKMIAKSEQEIGKATAKYFFYSNIMNFFKTEITLANGEIRKRPLIETNGETGEIVWDKGRDFATVRKVLSMPQVNIVKKTEVQTGGFSKESILPKRNSDKLIARKKDWDPKKYGGFDSPTVAYSVLVVAKVEKGKSKKLKSVKELLGITIMERSSFEKNPIDFLEAKGYKEVKKDLIIKLPKYSLFELENGRKRMLASAGELQKGNELALPSKYVNFLYLASHYEKLKGSPEDNEQKQLFVEQHKHYLDEIIEQISEFSKRVILADANLDKVLSAYNKHRDKPIREQAENIIHLFTLTNLGAPAAFKYFDTTIDRKRYTSTKEVLDATLIHQSITGLYETRIDLSQLGGDGSPKKKRKVSS

SEQ ID NO: 17080 - DNA, 4776 bp, unidentified
  source 1..4776: mol_type = genomic DNA; note = Streptoccocus pyogenes
atggcaccaaagaagaaaagaaaagtggagggcatcaagtcaaacatcagcctgctgaaagacgaactgcggggacagattagtcacatcagtcacgagtacctgtcactgattgatctggccttcgacagcaagcagaatagactgtttgagatgaaagtgctggaactgctggtcaacgagtatggcttcaagggcagacatctgggcgggtctaggaaacctgacggcatcgtgtacagtaccacactggaagacaacttcggaatcattgtcgataccaaggcttattccgagggctactctctgccaattagtcaggcagatgagatggaaaggtacgtgcgcgaaaactcaaatagggacgaggaagtcaaccccaataagtggtgggagaatttcagcgaggaagtgaagaaatactacttcgtctttatctcaggcagcttcaaagggaagtttgaggaacagctgcggagactgtccatgactaccggggtgaacggatctgctgtcaacgtggtcaatctgctgctgggcgcagaaaagatcaggtccggggagatgacaattgaggaactggaacgcgccatgttcaacaattctgagtttatcctgaagtatggaggcgggggaagcgataagaaatactccatcggactggccattggcaccaattccgtgggctgggctgtcatcacagacgagtacaaggtgccaagcaagaagttcaaggtcctggggaacaccgatcgccacagtatcaagaaaaatctgattggagccctgctgttcgactcaggcgagactgctgaagcaacccgactgaagcggactgctaggcgccgatatacccggagaaaaaatcggatctgctacctgcaggaaattttcagcaacgagatggccaaggtggacgatagtttctttcaccgcctggaggaatcattcctggtggaggaagataagaaacacgagcggcatcccatctttggcaacattgtggacgaagtcgcttatcacgagaagtaccctactatctatcatctgaggaagaaactggtggactccaccgataaggcagacctgcgcctgatctatctggccctggctcacatgatcaagttccgggggcattttctgatcgagggagatctgaaccctgacaattctgatgtggacaagctgttcatccagctggtccagacatacaatcagctgtttgaggaaaacccaattaatgcctcaggcgtggacgcaaaggccatcctgagcgccagactgtccaaatctaggcgcctggaaaacctgatcgctcagctgccaggagagaagaaaaacggcctgtttgggaatctgattgcactgtccctgggcctgacacccaacttcaagtctaattttgatctggccgaggacgctaagctgcagctgtccaaagacacttatgacgatgacctggataacctgctggctcagatcggcgatcagtacgcagacctgttcctggccgctaagaatctgagtgacgccatcctgctgtcagatattctgcgcgtgaacacagagattactaaggccccactgagtgcttcaatgatcaaaagatatgacgagcaccatcaggatctgaccctgctgaaggctctggtgaggcagcagctgcccgagaaatacaaggaaatcttctttgatcagagcaagaatggatacgccggctatattgacggcggggcttcccaggaggagttctacaagttcatcaagcccattctggaaaagatggacggcaccgaggaactgctggtgaagctgaatcgggaggacctgctgagaaaacagaggacatttgataacggaagcatccctcaccagattcatctgggcgaactgcacgccatcctgcgacggcaggaggacttctacccatttctgaaggataaccgcgagaaaatcgaaaagatcctgaccttcagaatcccctactatgtggggcctctggcacggggaaatagtagatttgcctggatgacaagaaagtcagaggaaactatcaccccctggaacttcgaggaagtggtcgataaaggcgctagcgcacagtccttcattgaaaggatgacaaattttgacaagaacctgccaaatgagaaggtgctgcccaaacacagcctgctgtacgaatatttcacagtgtataacgagctgactaaagtgaagtacgtcaccgaagggatgcgcaagcccgcattcctgtccggagagcagaagaaagccatcgtggacctgctgtttaagacaaatcggaaagtgactgtcaaacagctgaaggaagactatttcaagaaaattgagtgtttcgattcagtggaaatcagcggcgtcgaggacaggtttaacgcctccctggggacctaccacgatctgctgaagatcatcaaggataaggacttcctggacaacgaggaaaatgaggacatcctggaggacattgtgctgacactgactctgtttgaggatcgcgaaatgatcgaggaacgactgaagacttatgcccatctgttcgatgacaaagtgatgaagcagctgaaaagaaggcgctacaccggatggggacgcctgagccgaaaactgatcaatgggattagagacaagcagagcggaaaaactatcctggactttctgaagtccgatggcttcgccaacaggaacttcatgcagctgattcacgatgactctctgaccttcaaggaggacatccagaaagcacaggtgtctggccagggggacagtctgcacgagcatatcgcaaacctggccggcagccccgccatcaagaaagggattctgcagaccgtgaaggtggtggacgaactggtcaaggtcatgggacgacacaaacctgagaacatcgtgattgagatggcccgcgaaaatcagacaactcagaagggccagaaaaacagtcgagaacggatgaagagaatcgaggaaggcatcaaggagctggggtcacagatcctgaaggagcatcctgtggaaaacactcagctgcagaatgagaaactgtatctgtactatctgcagaatggacgggatatgtacgtggaccaggagctggatattaacagactgagtgattatgacgtggatgccatcgtccctcagagcttcctgaaggatgactccattgacaacaaggtgctgaccaggtccgacaagaaccgcggcaaatcagataatgtgccaagcgaggaagtggtcaagaaaatgaagaactactggaggcagctgctgaatgccaagctgatcacacagcggaaatttgataacctgactaaggcagaaagaggaggcctgtctgagctggacaaggccggcttcatcaagcggcagctggtggagacaagacagatcactaagcacgtcgctcagattctggatagcagaatgaacacaaagtacgatgaaaacgacaagctgatcagggaggtgaaagtcattactctgaaatccaagctggtgtctgactttagaaaggatttccagttttataaagtcagggagatcaacaactaccaccatgctcatgacgcatacctgaacgcagtggtcgggaccgccctgattaagaaataccccaagctggagtccgagttcgtgtacggagactataaagtgtacgatgtccggaagatgatcgccaaatctgagcaggaaattggcaaggccaccgctaagtatttcttttacagtaacatcatgaatttctttaagaccgaaatcacactggcaaatggggagatcagaaaaaggcctctgattgagaccaacggggagacaggagaaatcgtgtgggacaagggaagggattttgctaccgtgcgcaaagtcctgtccatgccccaagtgaatattgtcaagaaaactgaagtgcagaccgggggattctctaaggagagtattctgcctaagcgaaactctgataaactgatcgcccggaagaaagactgggaccccaagaagtatggcgggttcgactctccaacagtggcttacagtgtcctggtggtcgcaaaggtggaaaaggggaagtccaagaaactgaagtctgtcaaagagctgctgggaatcactattatggaacgcagctccttcgagaagaatcctatcgattttctggaagccaagggctataaagaggtgaagaaagacctgatcattaagctgccaaaatactcactgtttgagctggaaaacggacgaaagcgaatgctggcaagcgccggagaactgcagaagggcaatgagctggccctgccctccaaatacgtgaacttcctgtatctggctagccactacgagaaactgaaggggtcccctgaggataacgaacagaagcagctgtttgtggagcagcacaaacattatctggacgagatcattgaacagatttcagagttcagcaagagagtgatcctggctgacgcaaatctggataaagtcctgagcgcatacaacaagcaccgagacaaaccaatccgggagcaggccgaaaatatcattcatctgttcaccctgacaaacctgggcgcccctgcagccttcaagtattttgacaccacaatcgatcggaagagatacacttctaccaaagaggtgctggatgctaccctgatccaccagagtattaccggcctgtatgagacacgcatcgacctgtcacagctgggaggcgatgggagccccaagaaaaagcggaaggtgtctagttaa

SEQ ID NO: 17081 - protein, 1588 aa, unidentified
  source 1..1588: note = Streptoccocus pyogenes
MPKKKRKVEGIKSNISLLKDELRGQISHISHEYLSLIDLAFDSKQNRLFEMKVLELLVNEYGFKGRHLGGSRKPDGIVYSTTLEDNFGIIVDTKAYSEGYSLPISQADEMERYVRENSNRDEEVNPNKWWENFSEEVKKYYFVFISGSFKGKFEEQLRRLSMTTGVNGSAVNVVNLLLGAEKIRSGEMTIEELERAMFNNSEFILKYGGGGSDKKYSIGLAIGTNSVGWAVITDEYKVPSKKFKVLGNTDRHSIKKNLIGALLFDSGETAEATRLKRTARRRYTRRKNRICYLQEIFSNEMAKVDDSFFHRLEESFLVEEDKKHERHPIFGNIVDEVAYHEKYPTIYHLRKKLVDSTDKADLRLIYLALAHMIKFRGHFLIEGDLNPDNSDVDKLFIQLVQTYNQLFEENPINASGVDAKAILSARLSKSRRLENLIAQLPGEKKNGLFGNLIALSLGLTPNFKSNFDLAEDAKLQLSKDTYDDDLDNLLAQIGDQYADLFLAAKNLSDAILLSDILRVNTEITKAPLSASMIKRYDEHHQDLTLLKALVRQQLPEKYKEIFFDQSKNGYAGYIDGGASQEEFYKFIKPILEKMDGTEELLVKLNREDLLRKQRTFDNGSIPHQIHLGELHAILRRQEDFYPFLKDNREKIEKILTFRIPYYVGPLARGNSRFAWMTRKSEETITPWNFEEVVDKGASAQSFIERMTNFDKNLPNEKVLPKHSLLYEYFTVYNELTKVKYVTEGMRKPAFLSGEQKKAIVDLLFKTNRKVTVKQLKEDYFKKIECFDSVEISGVEDRFNASLGTYHDLLKIIKDKDFLDNEENEDILEDIVLTLTLFEDREMIEERLKTYAHLFDDKVMKQLKRRRYTGWGRLSRKLINGIRDKQSGKTILDFLKSDGFANRNFMQLIHDDSLTFKEDIQKAQVSGQGDSLHEHIANLAGSPAIKKGILQTVKVVDELVKVMGRHKPENIVIEMARENQTTQKGQKNSRERMKRIEEGIKELGSQILKEHPVENTQLQNEKLYLYYLQNGRDMYVDQELDINRLSDYDVDAIVPQSFLKDDSIDNKVLTRSDKNRGKSDNVPSEEVVKKMKNYWRQLLNAKLITQRKFDNLTKAERGGLSELDKAGFIKRQLVETRQITKHVAQILDSRMNTKYDENDKLIREVKVITLKSKLVSDFRKDFQFYKVREINNYHHAHDAYLNAVVGTALIKKYPKLESEFVYGDYKVYDVRKMIAKSEQEIGKATAKYFFYSNIMNFFKTEITLANGEIRKRPLIETNGETGEIVWDKGRDFATVRKVLSMPQVNIVKKTEVQTGGFSKESILPKRNSDKLIARKKDWDPKKYGGFDSPTVAYSVLVVAKVEKGKSKKLKSVKELLGITIMERSSFEKNPIDFLEAKGYKEVKKDLIIKLPKYSLFELENGRKRMLASAGELQKGNELALPSKYVNFLYLASHYEKLKGSPEDNEQKQLFVEQHKHYLDEIIEQISEFSKRVILADANLDKVLSAYNKHRDKPIREQAENIIHLFTLTNLGAPAAFKYFDTTIDRKRYTSTKEVLDATLIHQSITGLYETRIDLSQLGGDGSPKKKRKV

SEQ ID NO: 17082 - DNA, 4767 bp, unidentified
  source 1..4767: mol_type = genomic DNA; note = Streptoccocus pyogenes
atgcctaagaagaagcggaaggtggaaggcatcaaaagcaacatctccctcctgaaagacgaactccgggggcagattagccacattagtcacgaatacctctccctcatcgacctggctttcgatagcaagcagaacaggctctttgagatgaaagtgctggaactgctcgtcaatgagtacgggttcaagggtcgacacctcggcggatctaggaaaccagacggcatcgtgtatagtaccacactggaagacaactttgggatcattgtggataccaaggcatactctgagggttatagtctgcccatttcacaggccgacgagatggaacggtacgtgcgcgagaactcaaatagagatgaggaagtcaaccctaacaagtggtgggagaacttctctgaggaagtgaagaaatactacttcgtctttatcagcgggtccttcaagggtaaatttgaggaacagctcaggagactgagcatgactaccggcgtgaatggcagcgccgtcaacgtggtcaatctgctcctgggcgctgaaaagattcggagcggagagatgaccatcgaagagctggagagggcaatgtttaataatagcgagtttatcctgaaatacggtggcggtggatccgataaaaagtattctattggtttagccatcggcactaattccgttggatgggctgtcataaccgatgaatacaaagtaccttcaaagaaatttaaggtgttggggaacacagaccgtcattcgattaaaaagaatcttatcggtgccctcctattcgatagtggcgaaacggcagaggcgactcgcctgaaacgaaccgctcggagaaggtatacacgtcgcaagaaccgaatatgttacttacaagaaatttttagcaatgagatggccaaagttgacgattctttctttcaccgtttggaagagtccttccttgtcgaagaggacaagaaacatgaacggcaccccatctttggaaacatagtagatgaggtggcatatcatgaaaagtacccaacgatttatcacctcagaaaaaagctagttgactcaactgataaagcggacctgaggttaatctacttggctcttgcccatatgataaagttccgtgggcactttctcattgagggtgatctaaatccggacaactcggatgtcgacaaactgttcatccagttagtacaaacctataatcagttgtttgaagagaaccctataaatgcaagtggcgtggatgcgaaggctattcttagcgcccgcctctctaaatcccgacggctagaaaacctgatcgcacaattacccggagagaagaaaaatgggttgttcggtaaccttatagcgctctcactaggcctgacaccaaattttaagtcgaacttcgacttagctgaagatgccaaattgcagcttagtaaggacacgtacgatgacgatctcgacaatctactggcacaaattggagatcagtatgcggacttatttttggctgccaaaaaccttagcgatgcaatcctcctatctgacatactgagagttaatactgagattaccaaggcgccgttatccgcttcaatgatcaaaaggtacgatgaacatcaccaagacttgacacttctcaaggccctagtccgtcagcaactgcctgagaaatataaggaaatattctttgatcagtcgaaaaacgggtacgcaggttatattgacggcggagcgagtcaagaggaattctacaagtttatcaaacccatattagagaagatggatgggacggaagagttgcttgtaaaactcaatcgcgaagatctactgcgaaagcagcggactttcgacaacggtagcattccacatcaaatccacttaggcgaattgcatgctatacttagaaggcaggaggatttttatccgttcctcaaagacaatcgtgaaaagattgagaaaatcctaacctttcgcataccttactatgtgggacccctggcccgagggaactctcggttcgcatggatgacaagaaagtccgaagaaacgattactccatggaattttgaggaagttgtcgataaaggtgcgtcagctcaatcgttcatcgagaggatgaccaactttgacaagaatttaccgaacgaaaaagtattgcctaagcacagtttactttacgagtatttcacagtgtacaatgaactcacgaaagttaagtatgtcactgagggcatgcgtaaacccgcctttctaagcggagaacagaagaaagcaatagtagatctgttattcaagaccaaccgcaaagtgacagttaagcaattgaaagaggactactttaagaaaattgaatgcttcgattctgtcgagatctccggggtagaagatcgatttaatgcgtcacttggtacgtatcatgacctcctaaagataattaaagataaggacttcctggataacgaagagaatgaagatatcttagaagatatagtgttgactcttaccctctttgaagatcgggaaatgattgaggaaagactaaaaacatacgctcacctgttcgacgataaggttatgaaacagttaaagaggcgtcgctatacgggctggggacgattgtcgcggaaacttatcaacgggataagagacaagcaaagtggtaaaactattctcgattttctaaagagcgacggcttcgccaataggaactttatgcagctgatccatgatgactctttaaccttcaaagaggatatacaaaaggcacaggtttccggacaaggggactcattgcacgaacatattgcgaatcttgctggttcgccagccatcaaaaagggcatactccagacagtcaaagtagtggatgagctagttaaggtcatgggacgtcacaaaccggaaaacattgtaatcgagatggcacgcgaaaatcaaacgactcagaaggggcaaaaaaacagtcgagagcggatgaagagaatagaagagggtattaaagaactgggcagccagatcttaaaggagcatcctgtggaaaatacccaattgcagaacgagaaactttacctctattacctacaaaatggaagggacatgtatgttgatcaggaactggacataaaccgtttatctgattacgacgtcgatgccattgtaccccaatcctttttgaaggacgattcaatcgacaataaagtgcttacacgctcggataagaaccgagggaaaagtgacaatgttccaagcgaggaagtcgtaaagaaaatgaagaactattggcggcagctcctaaatgcgaaactgataacgcaaagaaagttcgataacttaactaaagctgagaggggtggcttgtctgaacttgacaaggccggatttattaaacgtcagctcgtggaaacccgccaaatcacaaagcatgttgcacagatactagattcccgaatgaatacgaaatacgacgagaacgataagctgattcgggaagtcaaagtaatcactttaaagtcaaaattggtgtcggacttcagaaaggattttcaattctataaagttagggagataaataactaccaccatgcgcacgacgcttatcttaatgccgtcgtagggaccgcactcattaagaaatacccgaagctagaaagtgagtttgtgtatggtgattacaaagtttatgacgtccgtaagatgatcgcgaaaagcgaacaggagataggcaaggctacagccaaatacttcttttattctaacattatgaatttctttaagacggaaatcactctggcaaacggagagatacgcaaacgacctttaattgaaaccaatggggagacaggtgaaatcgtatgggataagggccgggacttcgcgacggtgagaaaagttttgtccatgccccaagtcaacatagtaaagaaaactgaggtgcagaccggagggttttcaaaggaatcgattcttccaaaaaggaatagtgataagctcatcgctcgtaaaaaggactgggacccgaaaaagtacggtggcttcgatagccctacagttgcctattctgtcctagtagtggcaaaagttgagaagggaaaatccaagaaactgaagtcagtcaaagaattattggggataacgattatggagcgctcgtcttttgaaaagaaccccatcgacttccttgaggcgaaaggttacaaggaagtaaaaaaggatctcataattaaactaccaaagtatagtctgtttgagttagaaaatggccgaaaacggatgttggctagcgccggagagcttcaaaaggggaacgaactcgcactaccgtctaaatacgtgaatttcctgtatttagcgtcccattacgagaagttgaaaggttcacctgaagataacgaacagaagcaactttttgttgagcagcacaaacattatctcgacgaaatcatagagcaaatttcggaattcagtaagagagtcatcctagctgatgccaatctggacaaagtattaagcgcatacaacaagcacagggataaacccatacgtgagcaggcggaaaatattatccatttgtttactcttaccaacctcggcgctccagccgcattcaagtattttgacacaacgatagatcgcaaacgatacacttctaccaaggaggtgctagacgcgacactgattcaccaatccatcacgggattatatgaaactcggatagatttgtcacagcttgggggtgacggatcccccaagaagaagaggaaagtctga

SEQ ID NO: 17083 - protein, 594 aa, Trichoplusia ni; identical to SEQ ID NO: 14487

SEQ ID NO: 17084 - DNA, 2488 bp, unidentified
  source 1..2488: mol_type = genomic DNA; note = Argyrogramma agnata
ccctagaagcccaatctacgtcattctgacgtgtatgtcgccgaaaatactctgtctctttctcctgcacgatcggattgccgcgaacgctcgattcaacccagttggcgccgagatctattggaggactgcggcgttgattcggtaagtcccgccattttgtcatagtaacagtattgcacgtcagcttgacgtatatttgggctttgtgttatttttgtaaattttcaacgttagtttattattgcatctttttgttacattactggtttatttgcatgtattactcaaatattatttttattttagcgtagaaaatacaatggcgtctcgtcaacatttataccaggatgaaatagcagcaatactggaaaatgaagatgattattctcctcacgataccgactctgaaatggaagattgtgttacccaagatgatgtcaggagtgacgttgaagacgagatggtggataatattggcaatggtacgagtccagcaagtaggcacgaggatcctgagacccctgacccgtcatcagaagcttctaatcttgaggtaactttatcttcacacagaattattatattacctcagcgttcgattcgtgaaaagaataatcacatttggtctacaacaaaaggtcagtcttctggtaggactgctgctataaatattgtacgtaccaatagaggacctactcgaatgtgtagaaacattgtcgatccattactctgctttcaactttttataaaagaagagattgttgaggaaattgtcaagtggacaaacgtggaaatggtacaaaaacgtgtaaacctgaaggacatctcagcaagttatagggataccaatgaaatggaaatctgggctattataagtatgctcaccttatcggccgttatgaaagacaatcatctgtctactgacgagttgttcaatgtctcctatggcactcgatacgtttcagtaatgagtcgagagagatttgaatttctattgcgattattgagaatgggtgataaattactgagaccaaatttacgccaagaggatgctttcacacctgtgagaaaaatatgggagatttttatcaaccaatgtagactgaattacgtacctggcactaacttgactgtcgatgaacagttgttaggttttcgcggccgttgtcctttccggatgtatattccgaacaaaccggacaaatatggtattaaatttcctatggtatgtgatgctgctacaaagtacatggtagatgctatcccttatctaggcaaaagcactaagacacaaggtctgccattaggcgagttttatgtgaaggagctgactcaaacagtacacggaacaaacagaaatgtcacttgtgacaactggttcacgtctgttccattagctaagagtttgctaaacagtccatataatttaacgctagtgggaaccatcaggtcaaacaagagggagataccagaagaagtcaagaactcacgttcgcggcaggtaggttcgtcaatgttttgttttgatggccctctgacattagtttcctataaacccaagccgtcaaagatggtattcttattatcatcatgtaatgaagatgccgtggtcaatcaaagtaatgggaagccggatatgatattattttacaatcagaccaaaggaggtgttgattcatttgaccagatgtgttcatctatgtcgacaaataggaagactaataggtggcctatggcagtcttttacggcatgttgaatatggcatttgtcaattcctacattatatactgccataacatgttggctaaaaaagaaaaacctctaagtcgcaaagattttatgaaaaaattaagcacagacttgacaacaccgtcgatgcaaaaacgtctggaggctcctactttgaagcggtccttacgtgataacataacaaatgttttaaaaattgtaccacaggcagccatagatacttcatttgatgaaccagagccgaagaaaaggcgctattgtggattttgctcatataaaaaaaagagaatgacaaagacacagtgcttcaagtgcaaaaaaccagtatgtggagagcacaatattgatgtttgtcaagactgcatataaagactgttttttttgtatttgcattatatattatattctaaagttgatttaattctaagaaaaacattaaaataagtttctttttgtaaaatttaattaattataagaaaaagtttaagttgatctcattttttataaaaatttgcaatgtttccaaagttattattgtaaaagaataaataaaagtaaactgagttttaattgatgttttattatatcattatactatatattacttaaataaaacaataactgaatgtatttctaaaaggaatcactagaaaatatagtgatcaaaaatttacacgtcatttttgcgtatgattgggctttataggttctaaaaatatgattgggcctctaggg

SEQ ID NO: 17085 - DNA, 2488 bp, unidentified; identical to SEQ ID NO: 17084
  source 1..2488: mol_type = genomic DNA; note = Argyrogramma agnata

SEQ ID NO: 17086 - protein, 591 aa, Anopheles gambiae
MGDAMHVQWLSEETEEVPENEEDMLYEDVEYIEEYVHFPDGPESNVSGSVAVQNEESTGHVIKIESIDHAFDMLQNSVWSIKPPERTGTMGRKVAHPRPAPVGLAKSAKSPAECLSLFLDADVIAMITEYTNEQIKAEQPNYARERDANPTDEMEIMALLGVLYIAGTVRDGRENIERLFDTKMGTGLEAVYLTMTSLRYHFLIRSIRFDDPTAAPDEIEGDKLAPIRPIYERIVSNCQKYLRPGRFLMLDEQAVQFKGKCEFRQILPSAPGRAGFRFHLLVDCETSYVSNLEICVPENQNPYNLSYAPTDVAMRLTEPVQGRQKTVILGAGLTSIDLIEKLYASRTMAMGEVPKSYPDLPKALIANKGRPEHSTLAAYHDPATLVSYVTRRKEVMLLMSSFVDFDSEEQAGEQDEGEQHLKLVELYNRTKTTIRTIQQMCAKHNVVRSTRRWPVAVFFNLMNLSAINAWCIYCLNHPEEAKMSRRDFLVTMALELLRPQARRRLDSKTLPRLLRQRIGLFLGISREEYETVPVVERQGGESRGRCYLCGRARNKTTRISCHSCGKYTCNAHCAQLCRTCYMDDCASEQQE

SEQ ID NO: 17087 - protein, 565 aa, Anopheles gambiae
MADNLNNIPNCFPNNEDSSSDSDHDAKSDESDMENNIEEVMQASIMEELDEDSQEQATGRCVNALEARSSWKPWAGKQKPFPFFRKKRLRVDLPAKSTPYEIFSLILDDKLVAHIALAMNLYMEKKNAQKSKASKWLETNPKEVRKFIGLMIWMDLVRVGRLEDYWSESALYNFAVPRAAMYRERFRALLGAFCFYDDGTSKTDYKEPGKIGAFIDVLQSKFQALLHLGEDVVVREMLALGRDRTSFKQYIPASAHRHGRWALFKLCSLEGYTWGLKLCTEQRLIGEAQLANSVCMELCEPLLNQGRTVYIDNFHASFDLAQALLANQTHLVGTVRVNGSSMPKDVLLAKLRKGEIIARENDDGVMVLKWKGTCTMGLLSTKHSPALVPMESQVRSNRRWIRVARIQPEAVIAHIQAKGRPDRSDAIGPHITDLRKGMKWYKQVGLVLLLQVCVTNAWILHRMVTKKKLKLATFREQLVDQLVPLPNPTVERGLSGGEKKYTHHLEVRTDGNGRTVRRSCANCYAESRKTMSHYEAGRNKKATTTFCGSCPKQPQLCMPCFNKLH

SEQ ID NO: 17088 - protein, 500 aa, Anopheles gambiae
MFPLPSNCDPVFTMAALGPYVVIEPLDSEYVVNDTGPAACAEATPNTDGGGEPEQQSDDDDLICLWEEPQTFGIFDEPVGTNVPFDGADERTASEYAALVCDDALFDILVKGTNRHRKQWADCMRAGGQSVEPYRKVTVAEMKRYVGLLLVMGQVRKDCQHCYWSTNPLLETPVFANTMSYKRFQQISHYFHGMKQANRTYDAKPVLDHLVPKFQALYAPKQQLIVSELTIPQDVLNGQQTEPPNHSEDAQGSTPESAKRLRLLCESDTGYVLNVELANQQLDQVALTDVSIVRPYFGRWHHVYWGNDGITVAAAETLYANQTLACGTLRNDPDGTVAPERKSPVLVMDGQGKRILSTIHGAAAMQPTEGEPQGPPPACVADLNRHLADLERFEGLLVEEYLSNASVGWHIRTVLLLINVALLNAYILFSQTDTGSRFTFNVFRLAVAREWVGASEPLEEPTKFLPLIRGRKRKFLPLIPGRKRKETGLHNRVPKHPARN

SEQ ID NO: 17089 - DNA, 2634 bp, Anopheles gambiae
  source 1..2634: mol_type = genomic DNA
ccttccagcgggcgcgctgttgtaaataatacaacagttttatatttattggtttattcaatttttattctatttttatcttatcggcggtcatgggtattcctctataatgttattatctacgttttagactatttttgaagtgtttcagttcattgtattgcagacaatcgacgaagtacttatagtgttgtcacaaaatacaacacgcgccattccgtgtacctacgccaaacacaaaacgcgtgttcggtgtacgcatcgttcgtcgtatctgacttattattttgtaatttttatttttgtgtggtaataaaaacaaaaatatgtaagtattgttttatatcactatgcaatatataatatatacattttaatttttcttacaatatgttttttttattatttgtatacgccaaacacaaaacgcgtgttcggtgtacgcatcgttcgtcgtatctgacttattattttgtaatttttatttttgtgtggtaataaaaacaaaaatatgtaagtattgttttatatcactatgcaatatataatatatacattttaatttttcttacaatatgttttttttattatttgtatacgtttttggtacgtactaataatcgatattatttatacaatgtcttaggtcggatcatatgacagttgaacaaattcgaagtttactgcaagacatttcaactgaaacagattgtgttgatgaccaggagagtgatagtgatctaagtatcgaagatgtggaggtaagtgaccacgaaagcaattctgaacaagatttttcagacaatgaatcagatctagagactagtttgggggacagtacattctacataggaaaagataaaataactaaatggcaactaaaagagtttacaacttcaaaaattaggcaacataatatagtaaacgtagttcctggtccaaaggagtgcgctagaaatattgttagtgagatagatgcatttctaaaaataattgatcttgacatgattgacgaaatcgtaacgtgcactaacatgtatattagtaatatgagacaacgagttcaatactctagaccccgagactgcttagatacttcaaggtgtgaaatactggcttattttggacttttatttttgattggtataaagaaagctcatcatgctaatgtaaaagaattatggtcggcggatggttctggtacagaaataactagggccactatgagctacaaaagatttttgtttttatgtcgctgcctcagatttgacgatcgcggaactagagctgaaagacgggtgattgataaactgtctcctattcgtactacgtttgacctttttttgaaaaatatcaataagaattataatttgagtgaatatactactattgacgaaatgttacacccatttcgtggtcggtgtcaatggatacagtatatcccaagtaaaccggccaaatatggcatcaaaatgtttgcattatgtgatgcaaaaacattttacacgagtaaaatagagatttatgttggaaaacaaccacctggtccgtatgaggtttctaattcaccaattgatatcgtaaaacgattagtaacacccatcgaaaactctaaacgaaatcttaccactgacaactggtataccagtattccacttgcagattacttattacaaaaaaaaattactctaactggaactttgaaaaaaaacaagcgagaaatacctacagaatttttaccacataaaaaaaaagaagttggttcgagcgtgttcgggtttcaaaaaaataaaacgttagtgtcatacgtacctcgaaaaaacaaggcagttattttgctttcaactatgcaccatgattcaaaaattgatgtagaaactcgtaaaccagaaataattatagattataattgtaccaaaggtggagttgatacagtagataaaatgtgcgcggcatattctgtctctagaattacaaaaaggtggccacttgtaattttttattctttgatgaatattgctggaataaatgctcaggtactgttttcatactctaaacataacaatgcccctaaaattagaagattatttttgaaaacattggcatttgatctaatgaaggaacatcttgcttttcgagctcaaatctcaagtttaccatcggacatatcatcttttttgaaaataaaatatgctgttccaagtacatcagatgtatctacaacccccccttcaaaacgaggaacttgcttcgaatgcgggagaaaaaaaaatgcggctacatctatgaagtgcaccaagtgtatgcgatttgtatgtaagctacattcaaaaaaaattattatttgtgaaaagtgttctaataacgatgacaatggcaattctgaataatttcttactgtaaacaaatactaaaaataattttaatttttgatgtaataataataagacgtattgattttttaataaaacataattataatagtatttaaataaaaacaactttgtgaacgtacctattgtttattttattattagatataatatgtacgactatcacagcatattaggactgttgtaaaatttacaacgcgcgactactcttgtttcaaataatggcgcgcccgctggaagg

SEQ ID NO: 17090 - DNA, 2634 bp, Anopheles gambiae; identical to SEQ ID NO: 17089
  source 1..2634: mol_type = genomic DNA

SEQ ID NO: 17091 - protein, 545 aa, Acyrthosiphon pisum
MISDEDILLHLDEIIANEDEFIDDINFDIENNDIEVTELEVTDPPSPDHSPIVQRNFRPKEHYFDSSKCGVQKHEFGLNSNSSKLEFFKAFVSEFLLGKVAFETNRYAKQYIQSNEISHQSRVNAWKDTNVDEMYTFLATTILMSRNKKLDMKDYWSTDPLLSSPIFRQIISRNRYLLLHQMLHFCNNENQEKGNRLFKLDVVLDEIRTNFKAGMVPFQNIVIDESLVLWKGRLSFKQFIKTKRHRFGIKFFVLCDVETDFILDFIIYTGTETRLLPYDANIGISGAVVKTLIAPYLNKGYNLYTDNWYTSPILAQYLYKKKTTITGTVRKNRRGMPELKNKLAVGDVQSAHSKNIMVLKWVDRREVFMLSTKFDSNLDNSGKFDRKGNLVKKPICVINYNQCMGSIDKTDMLLSSVECVRKTSKCILNAFSAFKTVTGQNMPLANFQLEVIRQLLEKYGGNTVSPRGRPCTKDQPFRLSARHFPSDVKKLASGKVQRRKCIVCTRNNKRKDTMYMCQECDVGLCATPCFAIYHTKQNYLAVQLF

SEQ ID NO: 17092 - DNA, 2476 bp, Agrotis ipsilon
  source 1..2476: mol_type = genomic DNA
ccctagaagcccaatctacgtaaatttgacgtataccgcggcgaaatatatctgtctctttcacgtttaccgtcggattcccgctaacttcggaaccaactcagtagccattgagaactcccaggacacagttgcgtcatctcggtaagtgccgccattttgttgtaatagacaggttgcacgtcattttgacgtataattgggctttgtgtaacttttgaaattatttataatttttattgatgtgatttatttgagttaatcgtattgtttcgttacatttttcatatgatattaatattttcagattgaatataaaatggagtcccgtcaacggctaaaccaggacgaaatagctacaattttagaaaatgatgacgattattctccactggattcggactccgaggcagaagatcgtgtagttgaagatgatgtctggagtgataacgaggacgcgatgatcgactacgttgaagatacaagcaggcaagaggaccccgataacaatattgcttctcaggaatcggctaatcttgaggtaacttcgttgacttcacaccgaataattagtttgcctcagcggtcaatatgtggaaaaaacaaccatgtatggtcaactacaaagggacgtacgacgggcaggacttctgctatcaatataatacgcacaaataggggaccaacgcgaatgtgtcgcaatattgttgatccattgctttgttttcaactttttataacggatgagataattcatgaaatagttaagtggacaaacgtcgagatgatagtaaaacgtcaaaatttgatagacatttcagcaagctacagggatacaaatacaatggagatgtgggcgttagtcggcattctcactctgacggcagttatgaaagataaccacttatcaactgatgagttgtttgacgctacattctctggcaccagatacgtatcagtaatgagccgagagagattcgaattcctaataagatgtatgagaatggacgacaaaacactgcgaccaactcttcgtagcgatgatgcttttataccggtgagaaaactatgggagatttttatcaatcaatgcagactaaactacgttcctggcggtaacttgactgtagatgagcaattgttgggttttcgcggccgttgtccattccggatgtatattcccaacaaacctgataaatatggcataagattccccatgatgtgtgacgctgccacaaagtacatgatagatgccataccgtaccttggtaaaagtacaaaaacaaatggtttaccactgggcgagttttatgtaaaagagctgactaaaacagtacacggcacaaatagaaatgttacctgcgacaactggttcacgtctatcccattagcgaagaacatgctccaggctccatacaacctaacaatagtaggaaccatcaggtctaacaaaagagaaatacctgaagagatcaagaattctcgatcacggccggtaggatcctcaatgttttgctttgatggccctttgaccttggtttcgtataaaccaaagccgtcaagaatggtatttttattgtcttcctgtgatgaaaatgccgttatcaatgaaagtaacggaaaaccggacatgatattgttttataatcaaacaaaaggcggtgttgattcctttgaccagatgtgtaagtctatgtctgctaacaggaaaactaataggtggccgatggcggtcttttatggcatgttgaatatggcgtttgtgaattcctatataatatactgtcacaataagataaataaacaaaaaaaaccgataaaccgcaaagaatttatgaaaaatttaagtacagatctgacgacaccttggatgcaagaacgactaaaagcacctactttgaagaggactctacgcgacaatataacaaatgttttaaaaaatgtggtaccgccatctccggctaataatagtgaggagccaggaccaaagaaacgaagctattgtggattttgttcatataaaaaaaggcggatgaccaagacgcagttttacaaatgcaaaaaggctatatgtggagaacacaatattgacgtttgtcaagactgtgtataaagactgttttttttaaaaggcttataaagtattactattgcgtgatttaattttataaaaatatttaaaaccagttgatttttttaataattacctaattttaagaaaaaatgttagaagcttgatatttttgttgatttttttctaagatttgattaaaaggccataattgtattaataaagagtatttttaacttcaaatttattttatttattaattaaaacttcaattatgataatacatgcaaaaatatagttcatcaacagaaaaatataggaaaactctaatagttttatttttacacgtcatttttacgtatgattgggctttatagctagtcaaatatgattgggcttctaggg

SEQ ID NO: 17093 - DNA, 2476 bp, Agrotis ipsilon; identical to SEQ ID NO: 17092
  source 1..2476: mol_type = genomic DNA

SEQ ID NO: 17094 - protein, 610 aa, Bombyx mori; identical to SEQ ID NO: 14505

SEQ ID NO: 17095 - DNA, 2406 bp, unidentified
  source 1..2406: mol_type = genomic DNA; note = Chilo suppressalis
cccagattagcctactgtcctatatttaggacagtagaaataaaaaaaaatatcagaataccctctttatctaagattatttagtcttatgatttgcagtaagaaacgtgtcagctttattagaaaaaataaaaagacagttattttaacagtttttaccttataagtgtgtaataaaagtgcgttgcagacatggcaaatgacaggtatgtataaaaagttatattttactcgtgagttgtttttttctgtgttaatatctagttgataaccttaacttttgtactaaataaatattctagcaaaataatataaataaattacgtataacttgttacaaatactagcgtactatatataggacagtaggataatatacatgattttagtacaataatacaactttttctttacagaccgttagctgcgcatgaaattttagatgctttagaaaatgtttctgataatgaagaagattatagagaacgactgatatgtattctacctcctcctgttgatcctgcctgtctcactgacgaagattcgggtgaataagataatgtaactttgaataatttgccacgaaacattctgcttcaaccggctgaagtaatgattcaagggcagattatggtgagtgatacagaagaagaaccttctgattctacaggtcgaactaaacgtaggcgtacctacgcatggagaaaacgggacttggcaaaaaatcccgtgaattggccagatgttcaaggcgcttgccaagataagcgcccaattgagtggtttgaaaacttcttagatgaagatgttatttcgttgttggtgtcagagagcaataaatatgctgtcaaaaagaatttgcctggagacataaccactgaagatatgaaatgtttcatcggcatattgttggttagtggttattcatggctcccccgtagaagaatgtattgggaaaactcccctgatacaaagaatgaattgatcagctcggctatgactagggatagatttgactttatttttcgccaccttcatgtcaatgataatctggatttgcaagacaaatacacaaaagtacgccccctagttacacttctaaataaaaagttcttagagttttctcctcttgaagagcattacagtgtagatgaggccatgatcccctactatgatagacatggctgcaaacagcacataaaaggtaaacctattaggtacgggttcaaagcttgggttggtgctacacggttagggtatgttttatggatggaaccataccaaggtgctacaactatgtgcaatccaatatataaagaattggggctgggtgcaagcgttgttctcactttttgcgatgtgctgatttcacgtggcttcgaccttccttaccacgtagtttttgataatttttttactgggacgcccttgctggaagagataacaaagaaaggccttcgttgcactgggacagttcgagaaaacaggacatctagttgtcctctgattacatcgaagttactgaaaaaaaaggaacgtggtgctgtcgattacagaacgacacatgacaacacgttcattattgctaaatggcatgacaataatatattcagtattgcttctaatgctgtaggaataaatcctaaacaatctgccaaacgcttctcacaaagtgaaaagagaaacattgtcatagaagaaccacatatggtgtccatctataacaaatatatgggaggagtggatcggtctgatgaaaatatttcacattaccgaattggtatacgaggtaagaaatggtacatgccgttgctcacacacatgattgatcttgccgaacataatgcatggcagttatataaaataaatcatggaaaactggatcatcttggctttcgcagaagggtagcaattgctttgattgaatcaaacagaaaaaatgccaaaagagggcctagccgaccctcccatcatgaacatgctgatagtcgtaaagaccaaatgaatcatctggttattcctcaatcgaagcaaacacactgtcgtcaatgtcacaaaaaatgtttgacacgttgcaagaaatgtgatgttggagtgtgtgtcaagtgttttgaaacatatcattcataaatagtgttaatctagtaaattacatataacaatgggtaatataatcaatagttatctaataaactacactttttgattacattctgttttgtcataaatggtcttttatttcctcttattatcctactgtcctacatataggacggctgtttccctgaaagccttacacttaatttttttttcataattttttttatgttgcataagatctaataaactaaataatgtaacttttttgaaaattttcagaaaattttagtttcaggcttatctggg

SEQ ID NO: 17096 - DNA, 2406 bp, unidentified; identical to SEQ ID NO: 17095
  source 1..2406: mol_type = genomic DNA; note = Chilo suppressalis

SEQ ID NO: 17097 - protein, 622 aa, Drosophila melanogaster
MSSSGRKRKQQLKPRQDDHRSPVKRRSVDIKSEPLDGYPALADYDLSTADIKPDLTELQLQLVAEQQAASNTIRLELEQQESDSDEDGYSELDYQAEDVFCQDDMDDYDPDWSSQQTGSRLLFKFPIQQSGLKFGQRFQGPQHYFNQVLGNRSKFFSSLAQSCNLKGGELKSNPTTAEEMEIFMALSLLMCDLKLEHLSDYWSTNMFYGLVGFSGKIPLERYQQLLHCLNFDAPQLQAGRAKVKNSLLLDFINERMEEIYICGQQLVLNEPITLWKGALRYQDELPNKFRTNALLLHMLTEQSGLVVKILPEIVRKEDAPAWVRNSRQLVEHRNKIVLKLMEGYHGGRTVYTSKFYGSYGLAQELAKKSTYCTGLLDRNRYGNSKALVHQRLDSNSISTSYATSLMMAKWRRRAKSLYCFSSDCLAIYSKEMAMQKTNAKPKLIQELEFQLRPGNDGRHHLIHYQAACKELKANIKLTIFLLNILVYNAYLLYFANGQNARVGHLKSYSEFRVIIIKSLLREEVTNEPVTSIQKPETYERSKNKPVPEPRLKTILHEPMLIQQNGKPAKKNCRYCHKGGMLQFSRYMCNTCPDKPGLCQEPCFLLWHEQLKKVIRQTIGRSE

SEQ ID NO: 17098 - protein, 597 aa, unidentified; identical to SEQ ID NO: 14525
  source 1..597: note = Helicoverpa armigera

SEQ ID NO: 17099 - protein, 581 aa, Heliothis virescens
MSKMASKRLSNTQIVDVLEDDEECIIDSPDEDEVDAEVIQSDHNSESQESANEIDSEWSDTDNEPLSRLASEDSDNFYFSKNKCTKWAKEPPRTSVRVRRHNIMRETPGPKGRAKEIQTISEAFFCMFSMDTVNLVLQQTNDYIKSIQEKFQRERDCKVLEYEELLAYLGLLYMSGVLRSSHLNFKDLWATDGTGIEFFQNTMSFNRFLFISRCVRFDDKNTKSERLKTDKLAAVREFTDLMNNNFINNYCASENVTLDEQLPAFRGRFSGVVYMPNKPTKYGIKHYALVDSATFYLLKFEIYAGVQPEGPYRMPNDTVSLVKRMTEPIWGTGRNVTMDNWFTSVPLANILLKDHQLTMVGTIRKNKPEIPTCFQPKRTRTEHSSLFGFQEDVTLCSYVPKKSKAVLLISSMHNDNNIVESEKKKPEIILYYNSTKGGVDTNDQMCANYNVGRRTKRWPMVIFYHLLNVAGINAYVIFKNKIDHGISRREFLKHLAVDLVKVHQQTRSNIPQLPRAVQKRLKRNAEVQDPGSTSRGGPSTSYKRCHICPRSKDKKIRFMCAKCHHHICHDHSTMICDKCID

SEQ ID NO: 17100 - DNA, 2472 bp, unidentified
  source 1..2472: mol_type = genomic DNA; note = Macdunnoughia crassisigna
ccctagaaagatagtctgcgtaaaattgacgcatgcattcttgaaatattgctctctctttctaaatagcgcgaatccgtcgctgtgcgtttaggacatctcagtcgccgcttggagctcccgtgaggcgtgctcgtcaatgcggtaagtgtcactgattttgaactataacgaccgcgtgagtcaaaatgacgcatgattatcttttacgtgacttttaagatttaactcatacgataattatattgttatttcatgttctacttacgtgataacttattatatatatattttcttgttatagatatcgtgactaatatataataaaatgggtagttctataaacgatgagcatatcctctctgctcttctgcaaagcgatgacgagcttgttggtgaggattctgacagtgaaatatcagatcacgtaagtgaagatgacgtccagagcgatacagaagaagcgtttatagatgaggtacatgaagtgcagccaacgtcaagcggtagtgaaatattagacgaacaaaatgttattgaacaaccaggttcttcattggcttctaacagaaccttgaccttgccacagaggactattagaggtaagaataaacattgttggtcaacttcaaagtccacgaggcgtagccgagtctctgcactgaacattgtcagatctcaaagaggtccgacgcgtatgtgccgcaatatatatgacccacttttatgcttcaaactattttttactgatgagataatttcggaaattgtaaaatggacaaatgctgagatatcattgaaacgtcgggaatctatgacgggtgctacatttcgtgacacgaatgaagatgaaatctatgctttctttggtattctggtaatgacagcagtgagaaaagataaccacatgtccacagatgacctctttgatcgatctttgtcaatggtgtacgtctctgtaatgagtcgtgatcgttttgattttttgatacgatgtcttagaatggatgacaaaagtatacggcccacacttcgagaaaacgatgtatttactcctgttagaaaaatatgggatctctttatccatcagtgcatacaaaattacactccaggggctcatttgaccatagatgaacagttacttggttttagaggacggtgtccgtttaggatgtatatcccaaacaagccaagtaagtatggaataaaaatcctcatgatgtgtgacagtggtacaaagtatatgataaatggaatgccttatttgggaagaggaacacagaccaacggagtaccactcggtgaatactacgtgaaggagttatcaaagcctgtgcacggtagttgtcgtaatattacgtgtgacaattggttcacctcaatccctttggcaaaaaacttactacaagaaccgtataagttaaccattgtgggaaccgtgcgatcaaacaaacgcgagataccggaagtactgaaaaacagtcgctccaggccagtgggaacatcgatgttttgttttgacggaccccttactctcgtctcatataaaccgaagccagctaagatggtatacttattatcatcttgtgatgaggatgcttctatcaacgaaagtaccggtaaaccgcaaatggttatgtattataatcaaactaaaggcggagtggacacgctagaccaaatgtgttctgtgatgacctgcagtaggaagacgaataggtggcctatggcattattgtacggaatgataaacattgcctgcataaattcttttattatatacagccataatgtcagtagcaagggagaaaaggttcaaagtcgcaaaaattttatgagaaacctttacatgagcctgacgtcatcgtttatgcgtaagcgtttagaagctcctactttgaagagatatttgcgcgataatatctctaatattttgccaaatgaagtgcctggtacatcagatgacagtactgaagagccagtaacgaaaaaacgtacttactgtacttactgcccctctaaaataaggcgaaaggcaaatgcatcgtgcaaaaaatgcaaaaaagttatttgtcgagagcataatattgatatgtgccaaagttgtttctgactgactaataagtataatttgtttctattatgtataagttaagctaattacttattttataatacaacatgactgtttttaaagtacaaaataagtttatttttgtaaaagagagaatgtttaaaagttttgttactttatagaagaaattttgagtttttgtttttttttaataaataaataaacataaataaatggtttgttgaatttattattagtatgtaagtgtaaatataataaaacttaatatctattcaaattaataaataaacctcgatatacagaccgataaaacacatgcgtcaattttacgcatgattatctttaacgtacgtcacaatatgattatctttctaggg

SEQ ID NO: 17101 - DNA, 2472 bp, unidentified; identical to SEQ ID NO: 17100
  source 1..2472: mol_type = genomic DNA; note = Macdunnoughia crassisigna

SEQ ID NO: 17102 - DNA, 2464 bp, unidentified
  source 1..2464: mol_type = genomic DNA; note = Pectinophora gossypiella
ccctagataactaaacattcgtccgctcgacgacgcgctatgccgcgaaattgaagtttacctattattccgcgtcccccgcccccgccgctttttctagcttcctgatttgcaaaatagtgcatcgcgtgacacgctcgaggtcacacgacaattaggtcgaaagttacaggaatttcgtcgtccgctcgacgaaagtttagtaattacgtaagtttggcaaaggtaagtgaatgaagtatttttttataattattttttaattctttatagtgataacgtaaggtttatttaaatttattacttttatagttatttagccaattgttataaattccttgttattgctgaaaaatttgcctgttttagtcaaaatttattaacttttcgatcgttttttagatggatttgagaaaacaagatgagaaaatacgtcaatggcttgagcaagatattgaggaggacagtaagggagagtcagacaattcaagttcggaaacggaagatattgtggagatggaagttcacaaaaatacgagcagcgaatctgaagtttccagcgagtccgattacgaacccgtttgcccaagtaagagacagagaacgcaaattattgaatcagaggaatctgataactccgaaagtattcgcccaagcagaagacagacaagtcgggttattgattcggacgaaactgatgaggatgtaatgagctccactcctcagaatatccctcgtaatccgaatgttattcagccaagttccagattcctttatggtaaaaataaacacaaatggtcgtcagcagccaaaccatcttctgtgcgaacttctagaagaaacatcatacattttataccaggaccaaaagaaagagcaagggaagtttctgaaccaattgatatattttccctgtttataagcgaagatatgttgcaacaagtcgtgacatttactaatgcagagatgcttattagaaaaaataagtataaaaccgagacgtttactgtatctcctaccaatttggaagaaataagagctttgcttggtttattgttcaatgcagcagctatgaaaagtaatcatttaccaactcgcatgcttttcaatactcatcgatcaggaacgattttcaaagcttgtatgagcgcagaacgattaaattttcttatcaaatgcctccgatttgatgacaagcttacaagaaatgtaagacagcgagatgataggtttgcacctatacgtgacttgtggcaagcattgatatctaactttcagaaatggtacactccagggtcctatattaccgtagacgaacagctggtcggatttcgaggaagatgttcatttaggatgtatattccaaacaagcctaataaatacggaataaaacttgttatggctgcagatgtaaacagcaaatatatagtgaatgccattccgtacttgggaaaaggaactgatcctcaaaatcaaccgttggctacgttttttataaaagaaataacgtctacattacatggcacgaatcgaaacataaccatggacaactggttcacgtctgttcccttagctaacgagctgttgatggcaccttataatttgacattagtgggaactctaagaagtaataaacgagaaattcctgaaaaactcaaaaattctaagtcacgcgcaattggtacttcgatgttttgttacgatggtgataagacattagtttcatacaaagccaaatctaataaagttgttttcatcttgtctacaattcatgatcaacctgacatcaatcaagaaacaggaaaaccagaaatgattcatttctacaacagtacaaagggtgcagtagataccgtggaccaaatgtgctccagcatttccaccaacagaaaaacccaaagatggcctttgtgcgtgttttataacatgttgaatctatcgattatcaatgcgtacgttgtatacgtttataataatgttagaaataataaaaaacctatgtctcggcgtgacttcgttataaaactaggagaccaacttatggagccctggctgcggcagcggttgcagacggtgactttgagacgtgatatcaaggtcatgatacaagatatcttaggggagtcttctgatctagaagcccctgttccttctgtgtctaatgtgcgtaaaatctactacctatgtccttccaaagcccgaagaatgacaaaacaccgatgcattaaatgcaaacaggctatttgcgggccccataatattgacatatgtagtcgctgtattgaatagtttcactaagtaattttgttcctatttagtagataagtaacacataattattgtgatattcaaaacttaagaggtttaataaataataataaaaaaaaaatggtttttatttcgtagtctgctcgacgaatgtttagttattacgtaaccgtgaatatagtttagtagtctaggg

SEQ ID NO: 17103 - DNA, 2464 bp, unidentified; identical to SEQ ID NO: 17102
  source 1..2464: mol_type = genomic DNA; note = Pectinophora gossypiella

SEQ ID NO: 17104 - protein, 449 aa, Tribolium castaneum
MDIFRLVDLAAAYDGTATGFEIDVWRPTMNTTNVYPVHAIKMAENDNYVGLSKEEVSALKELITTAESEEDSDIETELENVNDCWSTDPLLHTPIFSKVMPRDRYLLLLRLLHFCDNTKQKKGERTFKIDLVMSFLSNRFKVLFTPFENLCIDESLVLWKERLSFKQYIKSKRHRFGVKMFVLCNVETDYILGFIVYTGSQTKIKPSDLGISGSVVLTLLEDYLDKGHNLYIDNWHSSPELALHLYQHKTNVCGTVRTNRRHMPKLPDPKVKGDIESQHTAEMMTGKVDRTSKEEVKKPTCIVDYNANMGSVDKVDMLLSSVECLRKTIKWYKKIFFHLVDLCMINAHAMYKLEVIRQIVKKYAKIQKTSKKGRPSSGDNPLRLIGRHFPQKIPPVPGGKKTCQRICFVCKHTQRGVSRRRDTSYQCAECDKALCLIPCFEVYHTKQIF

SEQ ID NO: 17105 - protein, 487 aa, Daphnia pulicaria
MQKKADAKKVAQHKAANRNWKECKVWGDVGRQSRADDDSPRPQFQERAIQFAPLEEPGPVLSQFNRFSNPLGVFKSMLGGEDTLYLLREATNDYIAEFWSSRKTPPSRKVGGKPEGRLIGPRLPAGGFVTDHELVAFFGIQFLIGYHRLPELSMFWEQQPDAGLGLGIIQQAMTRERFKFISKHIACASPWDDVDPNSDDPDQEPERPDPIRKIRPLVKRLNERYHACRKPPRGQSIDESMVKFKGRSVLRQTMKNKPIKSGFKIWSRCCHRGYTYKFEIYQGARFGEKQGRSRNNEAVERVVVDLCQPLTDQGFVVAFDRFFTSIALLDKLRENGVNAVGTILPSRVNQPIMTKNESNLRPDEFAAKFGGEPGTCRKGIFVWRDTKAFRVASNYHGSNLVKVRRKQRDGSFKTKSCPKAIDDYVNNMGGVDTANQLRSYYERDRKAKKWWHRLLYSLLETCLVNSWICFNDMVRSQMAEIKTSNTQ

SEQ ID NO: 17106 - protein, 589 aa, Xenopus tropicalis; identical to SEQ ID NO: 14518

SEQ ID NO: 17107 - protein, 585 aa, Homo sapiens
MSNPRKRSIPMRDSNTGLEQLLAEDSFDESDFSEIDDSDNFSDSALEADKIRPLSHLESDGKSSTSSDSGRSMKWSARAMIPRQRYDFTGTPGRKVDVSDITDPLQYFELFFTEELVSKITRETNAQAALLASKPPGPKGFSRMDKWKDTDNDELKVFFAVMLLQGIVQKPELEMFWSTRPLLDTPYLRQIMTGERFLLLFRCLHFVNNSSISAGQSKAQISLQKIKPVFDFLVNKFSTVYTPNRNIAVDESLMLFKGPLAMKQYLPTKRVRFGLKLYVLCESQSGYVWNALVHTGPGMNLKDSADGLKSSRIVLTLVNDLLGQGYCVFLDNFNISPMLFRELHQNRTDAVGTARLNRKQIPNDLKKRIAKGTTVARFCGELMALKWCDGKEVTMLSTFHNDTVIEVNNRNGKKTKRPRVIVDYNENMGAVDSADQMLTSYPSERKRHKVWYKKFFHHLLHITVLNSYILFKKDNPEHTMSHINFRLALIERMLEKHHKPGQQHLRGRPCSDDVTPLRLSGRHFPKSIPATSGKQNPTGRCKICCSQYDKDGKKIRKETRYFCAECDVPLCVVPCFEIYHTKKNY

SEQ ID NO: 17108 - protein, 409 aa, Mus musculus
MPPSASAVDFFQLFVPDNVLKNMVVQTNMYARKFQERFGSDGAWVEVTLAEMKAFLGYVISTSVSHCESVLSIWSGGFYSNRSLALVMSQARFEKILKYFHVVAFRSSQTTHGLYKVQPFLDSLQSGFDAAFRPSQTQVLHEPLIDEDPVFIATCTERELRKRKKRKFSLWVRQCSSTGFIIQIYVHLKEGGGPDGLDALKNKPQLHSMVARSLCRNAAGKNYIIFTGPSITSLNLFEEFEKQGIYCCGLLSSRKSDCTGLPPSMLTNPATPLARGQHQIRTKGNMSLICWYNKGHFRFLTNAYSPVQKGVIIKRRSGEIPCPLAVEAFAAHLSYICRYDDKYSKYFISHKPNKTWQQVFWFAISIAVNNAYILYKMSDAYHVKKYSRAQFGERLVRELLGLEDSSPAH

SEQ ID NO: 17109 - DNA, 2511 bp, Macaca fascicularis
  source 1..2511: mol_type = genomic DNA
ttggcagatcaagcaaaactgtcttttgaaaggaaggagcaagctacttgtaataaaagaccagctagaaaagctccagcctcagtcacgcctccggccccaacacaaagtaaaaacaaaccaaacaagaaagccaaagttctgtccaaaaaagaggagcgtttgaaaaagcacatcaagaaactccagaagagggctttgcagttccaggggaaagtgggattgccaaaggcaaggagaccctgggagtcagacatgaggccagaggcagagggagactctgagggtgaagagtctgagtatttccccacagaggaggaggaggaggaggaggaagatgacgaggtggagggggtggaggcagacctctctggagacggtactgactatgagctgaagcctctgcccaagggccggaaacggcagaagaaagtcccagtgcaggagattgacgacgactttttcccaagttctggggaagaagctgaagcttctcctataggagaaggaggaggaggaggtcggaaagtaggaagataccgagatgatggagatgaagattattataagcagcggttaagtcccaagatgcctcgaacactaagtttacatgaaataactgaccttttagagacagatgacagcatagaagcaagtgctatagtgatacaaccacctgaaaatgctacagcacctgtttcagatgaggaatcaggagatgaagaaggtggaacaataaataatctgccaggttctttgttgcacacagctgcgtatcttattcaagatggctctgatgctgagtctgactcagatgatccctcatatgcacctaaagatgactctcctgatgaagttccatctacgtcttctgtgcagcaacctccaccatcaaggaggaggaaaatgacaaaaattgtttgcaaatggaaaaaagccgacctaactgtacaacccgtagcaggtagagttacagcaccaccaaacgatttcttcaccgaaatgagaactcccacagaaattcttgaactttttcttgatgacgaggtcattgaactcattgtcaagtactccaacttatatgctgacagtaaaggtgtacatcttggcttgactagctctgaattcaaatgttttctgggaattatttttctgagtggttatgtttcagttcctagaaggcgtatgttttgggaacaaagaacggatgtgcataatgtactggttagtgctgccatgagacgtgaccgatttgaaactatattttctaatttgcatgttgctgacaatgcagatttggatccagtggacaaattttccaaattgcgacctctcataagcaaactcaatgagagatgcatgaaatttgttccaaatgaaacatatttcagctttgatgaattcatggttcattattttggtcgtcatgggtgcaaacagtttattcggggaaagcccattcggtttggctataagttttggtgtggtgccacctgtctgggctacatttgctggtttcagccgtatcagggtaaaaacccaaatactaaacatgaggaatatggtgtcggtgcgtcacttgtccttcagtttagtgaggcacttacagaggcacaccctggacgataccattttgtatccaataactttttcaccagtattgcacttcttgataagctcagttcaatgggacatcaggcaacaggtacagtgagaaaggatcacattgacaaagttccattggaatcagatgtagctttaaagaaaaaagaaagaggcacatttgattatcgaattgatggcaaaggcaatattgtctgcagatggaatgataacagtgttgtcactgttgcctcatctggtgctggtatccatcccctgtgtcttgtcagtcgttattcccagaaattgaaaaagaagatccaagttcagcagccaaacatgatcaaagtgtataaccaattcatgggaggcgtagacagagctgatgaaaacattgataagtatcgggcctcaatccgtggaaagaaatggtattcaagccctcttttgttctgtttcgaattggtcttacaaaatgcttggcaattgcataaaacatatgatgagaaaccagtggattttctggagtttcgtcgacgtgtggtatgccattatctggagacccatggtcatcctccagaacctggccaaaaaggaagacctcagaagcgtaacattgactcccgttatgatggcataaatcatgtgatagtcaaacagggaaagcaaacgcggtgcgctgaatgtcataagaacaccgcttttcgatgtgaaaaatgtgatgttgccttacatgtgaagtgttccgttgaatatcacactgaatagcaggtgtcaccacctcctgagacaagaaacataattttatacattatgtacagtggttttgcctagtgttccaattttggaacgtcacataacaatggaacataataaattttttttatcttcaaaaaaaaaaaaaaaaaa

SEQ ID NO: 17110 - protein, 591 aa, Rattus norvegicus
  VARIANT 382: note = misc_feature - Xaa can be any naturally occurring amino acid
MSHTDLHGRWFVLCDESVDAVSYACPMRFLLVSESQCPFEGDDPARGGAHSKVRSPKLLKVLSALEEGESGSNREEIFIAPPNNASEDLTDEDSGEEDSDQNSAQLPGWVLRASVLFIVNETNRYARQKNITLDLTVQELKRDRFELIFSYLHFVDNSEPDESDSFAKGTLFTKDRGLDVGASMVVRFVDALQECGCLPCHIFLDKVFTSVKPMSILREKGVKATGTVCEYRTECCPLKDAKELRKMRKGSFDYRVDESQEIIVCRWSNSHVVNICSNAVGIEPARGVGRMDQNIAKYKVKIRGMKRYLSFIGYIIDAALNNAWQLHRVCCQDGHVDLHSFRSYVARVYLESNVDTSSPGRRSRWVETENRFNMIGHWIVHXDKRTQCALCHSQTNTCCEKCQKGVHTFSSYSDITRNTFRWPVRRDRDVGKETFTQAWGGGAGKTQSQLLSKVDDIKQSLDIIHTQRAPESLKIRDPVTRGRDCIEQRGLRMQVLVSHRQHSRVPSRRELEEAVALGLALSLTLMCAQQNEDPSNKIKQQKKTERKHRHVVATSIHILEPGQKAVSSVPETGPMIVSDLPCVATNVQTPR

SEQ ID NO: 17111 - protein, 581 aa, Ciona intestinalis
MAVKGVSADETIWSFLEAESEKDKGDAAYACSSDESDILMDEFNATSSKNVDAPNHCCLSSDDETTVHTSSKLQKLLNDRSKSKRTVQQTHLEELSAEDSMEDWVRIVTDYYPEDHNLRETVMESGMDGVTPLDYLAMFLSAEFWDLLVTETNRHAAQTLRKKKLKKGSNLRTWKDTTVAEMKAYFAILLSMGLCNTVDMQDYWSASWITVTSSISKIMSRVRFTLIRAMLHFCNDEESSSKNSQKHNRLFKVRQLIDVLVPKFSALYKPDKELAIHEMTVACNYKSEQRVRKKPIQWTDKVYALTEARTGYLLEWAIHAGSSRETEKGASIVRKLCTRYIGKHDIYINTANSYTNRNLAKEFVSQTNGSGGIPGELKTINEKNNPVCAKSAVRSSEIKAKSATQKGNKRSYNDMKKANSKKRYNYLSGVIPIFRQLNLFRHKTVKWSLRIFENLAQICVVNSYILYTSKTSDSSDKMDLKKYIEACVSGLLVDYNPHITEKWRPPQPGTVLSRILPPQYVHKIIKIDKKPQCVVCSDSRRKLGRRQTSFMCEKCNVALCVVPCFHRYHTLKNYRVCHLDM
